United States Patent Application Publication US 2018/0265913 A1 - sequence listing, part 2

SEQ ID NO: 1 - DNA, 6725183 bp, Pseudomonas aeruginosa SCV20265 (residues 1,681,297-3,362,592 of 6,725,183)
atccgccgatgcgccgccccgcaaggcgaacgccaacccaaaaaagcccggctattgccgggctttttcatgcgcgcgcgtcggtggccgatcaggcctccggctgtaccggcacgtggatcagttgcaggcgctcgctgctccaggcacgggtgctgttggtcagctcgatgtcgttgttcagcttgcgcccgtaagacggcacgatttccttcaggcgtgcctgccactcgggggtagcgaccttgtccttgaaggccttctccagcaccgacagcatgatcggcgcggcggtcgaggcgcccggcgaggcgccgagcagggcggcgacggagccgtcggcggcggtcaccacttcggtgccgaattgcagtacgccgcctttctcggcgtccttcttgatgatctgcacgcgctggccggcctgcaccagcttccagtcctcgtcgcgggcttccgggaagtactcgcgcagcgaggccatgcggtcgtcctggctgagcatcagctggccgatcaggtactggctgagatcgaagttgtcgatgccggcgttgaacatcgggccgatgttgccgctggtcaccgagcccggcaggtcccacagcgagccgttcttcaggaacttggtggagaaggtggcgaacggaccgaacagcagaaccggcttgccgtcgatcatgcgggtgtcgaggtgcggcaccgacatcggcggcgaacccaccgaagccttgccgtagaccttggccaggtggcgcttgaccacgtccgggttggtggtggcgaggaacgaaccgcccaccgggaagccggcgtagccttcggcctcggggatgccggacatctgcagcagcttcagcgcgccgccgccggcgccgatgaagacgaacctggccttgacgctggtttccttgtcgccattggccaggtcggccatggtcacggtccaggtgttgtcgtcgttgcgcttgaggtcgcggacctcatgttgcaggcgcagcttgaaggtgtccttggccgacagcgagcccaccagttggcgggtgatctcgccgaagttgacgtcggtgccgatcgacatgcgcgtggcggcgatcttctgccccggctcgcggccttccatcaccagcggcacccactgcttgatctgctcggggtcttccgagtactccatgccgcggaacagcgagctgtgctgcagggcggcgtggcgcttcttgaggaaggcgacgttgtcgtcgccccagacgaagctcatgtgcgggacgttgttgatgaacgacttcggatcgttcagcaccttgcggtcgacctggtaggcccagaactgcttggagatctcgaagttctcgttgatcgccaccgccttgctgatatccatcgagccgtccgcggcctcgctggtgtagttcagttcgcagaacgccgagtgaccggtgcccgcgttgttccagccgttggagctttcttcggcgaccttgtccaggcgctcgaccatctcgatggtccagcccggttccagttcgttcagataggtacccagggtggcgctcatgatgccgccaccgatcaggagcacgtcgaccggtttttccgattcgacgctgtttttggagcaacccagcacgctgacgcacaaaagcatcaataagatttttttcatggatttaccgctagaaaacgtggagaagcgtggatacgcacgacatggcaggtattcaccgggtgaatgatactggaactcacccccgatgtgagtgcgttcacatgcggtgacatttgcctcggcgttccgccgagaatacctgccttccctttcttgaacgtttcagccgccgggaaataaattcagcgcctgtatcgtttcagcgggaacccggcgcgtggatttccgccgattggcgcatcctgcggatatacgcgtcgatttcccgctccgcgtcgaaacgggtgaaatagggaccttccagggtcccttcgcgggtggagaagaagtactgcccattcaccgaacttatgcgatcgctgcgaaagcgggtggccggggtgggatcggtggaacgtttccccaacatgacggcgactcctggatagcgggccaaggtgttttcagtgtaggcgggggttggccgggcggcaggccggcggacgaaaggagacggatttccaggcgaagggttgggtattctatttttggttataagaaaatctgaatttattctttttaacgtcgaccggccttgggcatagtgggtcccaacacgaacaaggagtgacccccatgagcctcagactcggcgacatcgcccccgatttcgaacaggattccagcgaagggcgcatccgcctccacgaatggctgggcgacagctggggcgtgctgttctcccacccggccgacttcaccccggtgtgcaccaccgagctgggcttcaccgccaagctcaaggaccagttcgcccagcgcggggtcaaggtcctggcgctgtcggtggatccggtggactcgcacctgaagtggatcgacgatatcaacgagacccaggacacccgggtcaacttcccgatcatcgccgacgccgatcgcaaggtctccgaactctacgacctgatccacccgaacgccaacgacacgctgaccgtgcgttcgctgttcatcatcgacccgaacaagaaggtgcgcctgatcatcacctacccggcgagcaccgggcgcaatttcaacgagatcctccgggtgatcgattcgctgcaactgaccgacgagcacaaggtcgccacgccagccaactgggaggacggcgacgaggtggtaatcgtgccttcgctgaaggacgaggaagagatcaagcggcgtttccccaaaggctaccgcgcggtgaagccctacctgcgcctgacgccccagcccaaccgctgaggccggattcgtcccgcctgcatgggcaggcacggcaggcgggaccttttattcgacggtgcgtgccgtcatgcaacgctgtttagccacgagcagggtttttggccggtttcgaccggccctcttttttatgtgcgcgagcgcgtcgccgcgacgctttttatccgccatccatttccgaaaccggctctgacttgcccgccagacggggagaaggctcgctcatccacctccttccaggagcagacgcatgatcgccgctctccgtcgctgccgggcctggctggccctgctcgccgttcttgccgtgtttcccgcggcagaggccgccgcccccgctgaaatccgtctcgactatgcctactacgcccccaccagcctggcgctcaggaagttcggctggctggagaaaagcctggacggcagcggcacccgggtgcgctgggtgttcagccagggcagcaaccgttccctggagtaccttaacgccggcagcgtcgatttcgcctcgaccgccggcctcgccgcggtactcgcgcgggccaacggcagcccggtacgtaccgtatacgtcgccagccgcccggagtggaccgcgctgctggtgcgcaaggattcgccgatccgcagcctcgccgagctcaaggggcgcaaggtggctgccaccaagggcaccgatccctacctgttcctgctccgcagcctgcacagcgtaggcctggacaagaacgacctgcgtatcgtccacctgcagcatcccgacggccgggtagccctggagaagggccaggtcgacgcctgggccggactcgatccgcacatggcggccagcgagttgcaggccggctcgcggctgctctaccgcaacctcggcttcaacagctacggcgtgctcaatgtccgcgaggatttcgccgaacgccatccgcaactgatccgccaggtgctggcggcctacgagcaggcgcgccactgggtgatcgggcatcccgacgaggccgcgcaactgcttgccgaggaagccggcctgccgctggaagtggctcgcctgcaactgtcgcgcaccgatttcagccagccgctgccgggcgccgaacaggtcgccgcgctcaaggccgcggcgccgatcctggcggacgagcgcctggtgcggccgggcgtggacgtgcagaaggtggtcgacgaactgatcgcgccgcagtgggccgccgaggtcatcggcggtgtcccgttggcgcgcacggagccctgagccatggtcagccagagcctgcgactggcccggcgagtctcgcgccgggcgtggcgactgcgcgtgccgggcgcctggcgggcctgggccttgccgctgctggcactatcgtcgtgggaggcgctggtgcgcctgggctggctgccggcctaccagatgccggcgccgagcggcatcctgctgaccctggtggaactggctcgcggcgagctgtgggggcatgtcggcgcgagcctggcgcgggtcgccgccggcttcgcgatcggcagcggcctggccctggtggtcggtacctgggtcggtctcagtcgtcgcgccgaagcctacctggagccgagcttccaggccctgcgggcgatccccagcctggcctgggtgcccctgctgctgctctggttcggcatcgacgagacgccgaagatcgtcctcatcgccctcggcgccttcttcccggtctacctcgcgctggtcgccggggtacgcggggtcgatcgcaagtgggtggaactggggcggctctaccgtttgtcgcgcttcgccctggtccgccgcatcctccttccggcggcgctgccgaacctgttcaccggcctgcgcggggcgctcagcctgagctggatgttcctcgtcgcggcggagctgatcgccgccacccagggcctcggctacctgctcagtgacggtcgggaaacctcgcgtccggacctggtgatcgccgcgatcctggtcctggcggccctcggcaagctcagcgatggcctgctccgctcgctggagcgccgggccctgcgctggcgcgacagcttcgacggggagggcggcgcatgagcggcctgctcgacctgctggagattcgcaaggcctatggcgatacgcgggtgctggagggcgtggcgctgtcgctggcgcccggcgaggtggtcagcctgctcggccccagtggttgcggcaagagcaccctgctgcggatcgccgccggactggacgatgacttccagggcactgtcgaacgcaacccgatcctcggcttcggcccggacggcgagaacggccgcagcggcggaatcggcgtggtgttccaggagccgcgcctgttgccctggctgacggtggcgcagaacgtcggtttcgccgacggctggctggaggacgagcactgggtcgagcgcctgctcgccgatgtcggactggccggctgcggaggattgctgcccaagcaactgtccggcggcatggcgcagcgcgcggcgatcgcccgcggtctctacggacggccgcaggtgctgttgctcgacgagccgttcagcgcggtcgacgccttcacccgcatgcgcctccaggacctgctgcaggacgtggtgcagaactacgagatcagcgtcctgctggtcacccacgatctcgacgaggcgttctatctcgccgaccgcgtgctgctgatgggcggccgtcccggacacatccgccgcgagttccacgtaccgctggcgcgtccccgcgatcgccgggcggtggagctggcctacttgcgcggcgaggccctgaccgaaatgcagcgggcgcacgtgctctgaggcaagaccccgaaccgggttcttatatgctttatggaataaataaatgaataaaaaacatttattggaatatgaggccgcctgttaaggtctatgcaacttggttagcaagccaaacgaatattctgttttccggttataaggaatccccccatgctcgtcgtttccatcgccggaagtcccagcgtacgctcccgctccggggtgttgctggagcgtgccagggactggctgagccgtcgcggcgtcgaggtggccagccaccaggtgctggattttcccgccgaggacctgctgcgtgcccgcctcgacagtccgccggtactggcgctggccgagcagatcggccgcgccgacggcctgctggtcgccactccggtgtacaaagcctcgttttccggcgcgctgaaggtcctgctcgacctgttgcccgagcgcgccctggagcacaaggtggtgctgccgttcgctaccggtggcagcagcgcgcacatgctggccgtggactatgcattgaagccggtcctggccgcgctcaaggcccaggaggtactgcatggcgtattcgccgtggacaagcagatcgcctacgccaccgagagcgacccggcgcgcctggaaccggtcctcgagcagcgcctggaagacgccctggaaaccttccacctggccctctcgcgacggccgcagccgatcgacccgcagttgctcaacgagcgcctggtgaacgcccgctggagcatctgatccgtccgccgccagcgcacgcgcgccgcggcccgattgcacaacgcacacacgacgacctcactgttccgtcaacggcgcggcaggttcggcacccacaacgacaaaggagagcgccatgcgcaccatcgctttgcgtcgtggactggcggccctgctggtggcggccctgtcctacggcgttcaggccgacgagaagtcggccaacaccctgcggatcggctaccagaaatacggcaccctggtcctgctcaaggcccgcggcaccctggagaaacgtctcgccgaagacggcgtgaaggtgcaatggaccgagtttcccggtggcccgcaactgctcgagggactcaatgtcggcagcatcgacttcggcgtgaccggcgaaaccccgccggtattcgcccaggccgccggcgccgacctgctctacgtggcctacgaaccgccggcgccgaccagcgaggcgatcctcctgccgaaggactcgccgattcggtcggtggccgagctgaagggcaggaaagtcgccctgaacaagggctccaacgtgcattacctgttggtccgcgccctcgagcaggccggcctgaagtacagcgacatccaacccgtctacctgccgccggccgacgcccgcgccgccttcgagcgtcacagcgtcgacgcctgggtgatctgggacccctaccaggccgccgccgagaagcagttgtccgcgcgggtcctggtggatggtcgcgagctggtcgacaaccaccagttctacctcgccacccggacttacgcgcaacggcatccgcaggtgctcgacaagctagtggacgagatccgcgaggtcggtgactggtcgcgggccaacccgcagcaggtgaccgagcaggtcgcgccgctgctcgggctgcccgccgacatcacccttaccgcggtgaagcgccagggctacggcgcgcagttgatcaccccggcggtggtcgaggcgcagcagaagatcgccgacaccttcacccagctgaagctgattcccaaaccgctgagcatcaaggacgtgatctggacgccaccggccggcaaggtcgccagcgcaccctgagcccgtaccgcccacataccgacacgatcatcgcgcggctacgccacgccggcgcgctcaccctggagtcaattgcgatgagcctcgagattttctggttccttcccacccacggcgacggccactacctgggcaccacccagggcgcccgtgccgtcgaccacggctacctgcagcagatcgcccaggccgccgaccgcctgggcttcggcggcgtactgatccccaccggacgttcctgcgaggactcctggctggtcgccgcctcgctgatcccggtaacccagcgcctgaagttcctcgtcgcgctgcgtcccgggatcatttcgccgaccgtcgccgcgcgccaggcggcgaccctggaccggctgtccaacggccgcgcgctgttcaacctggtcaccggcggcgatcccgacgaactggctggcgacggcctgcacctgagccacgccgaacgctacgaggcgtcggtcgaattcacccgcatctggcgtcgtgtgctggagggcgagaccgtcgactacgccggcaagcacatccaggtgaagggcgccaaactgctctatccgccgttgcagcagccgcgtccgccgctgtacttcggcggctcctcggaggccgcccaggacctcgccgccgagcaggtcgagctgtacctgacctggggcgagccgccggcggcggttgccgagaagatcgcccaggtacgcgagaaggccgcccgccagggccgccaggtgcgcttcgggatccgcctgcacgtgatcgtccgcgagaccagcgaggaagcctggcaggccgccgatcgcctgatcgcgcacctcgacgacgacaccatcgcccgcgcccaggcctccctggcgcgcttcgactcggtcggccagcaacgcatggccgcgctgcacggcggttcgcgcgacaacctggaagtcagccccaatctctgggccggcgtcggcctggtgcgcggcggcgccggcaccgcgctggtcggcgacgggccgacggtggcggcgcgggtcagggagtacgccgagctgggcatcgataccttcatcttctccggctatccgcacctggaagagtcctaccgggtcgccgaactgctgttcccgcacctcgacgtgcagcgcccggcgcagcccgagggacgcggctatgtcagcccgttcggcgagatggtggccaacgacatcctgccccggcaggccgcgcagagttgagagcggtcggagcgaacgacatgagcatttccaaacgactggccgagcgcctggcgccctgggcgctgccgctggtcctgctggcggtgtggcaggcggcggttgagttcggctggctgtccagccgcatcctccccgcgcccagcgccgtactcgaggccggctgggcgctgctgcgcagcggcgagatctggcagcacctggcgatcagcggctggcgcgcggcgatcggctttctcatcggcggcgccatcggcctggtgctgggcttcgtcaccggcctgtcgaagtggggcgaacgcttcctcgacagttcggtgcagatgatccgcaacgtgccgcacctggcgctgatcccgctggtgatcctgtggttcggcatcgacgagtcggcgaagatcttcctggtcgccctcggcacgctgttcccgatctacctgaacacctaccacggcatccgcggcatcgaccccggcctgctggagatggcgcgcagctacgggttgtccggcttcgccctgttccgccaggtgatcctgcccggcgcgctgccgtcgatcctggtcggggtgcgcttcgcccttggcttcatgtggttgaccctgatcgtcgccgagaccatttccgccagctccggcatcggttacctggcgatgaacgcccgcgagttcctgcagaccgacgtggtggtcctggcgatcctgctctatgccgtcctcggcaagctcgccgacctcgccgcccgcggtctggaacgcgtctggctacgctggcacccggcctaccaggtcaagggaggtggcgcatgaatgcccacaacgccgcccttggcggcactccgcagcgcctcaagcgcggtatcccgctggccctgcgcggagtggcgcggcgcttcggcgagcgcgaggtgctcaaggacatcgacctgctggttccggccgggcagttcgtcgctatcgttggccgcagcggctgcggcaagagcaccttgctgcgcctgctggccggcctcgaccagcccagccgcggcgagttgctggccggctcggcggcgctggccgaggcccgcgaggacacccggctgatgttccaggactcgcgcctgctgccgtggaagcgggtgatcgacaacgtcggccttggcctgcgcggcgactggcgggcgaaggcccagcaggcgctgcgggcggtcggcctggccgagcgtgccaacgagtggccggcggccctgtccggcgggcagaagcagcgcgtcgcgctggctcgcgcgctgatccacgagccgcgcctgctgttgctcgacgagccgctcggcgcgctcgatgcgctgacccggatcgagatgcagcaactgatcgaaggactctggcgcgaacacggtttcaccgtcctgctggtcacccacgacgtcagcgaggcggtggcggtggccgaccgggtgatcctcatcgaggacggcgagatcggcctcgacctgccggtggaattgccccggccgcgctcgcgtggctcggcgcgactggccgcgctggaagccgaagtgctcaaccgggtgctggcgcagccggagctgccgccgcaacccgagcccgtttcacccctgcccacgcaactgcgctgggcgctctaaccaaccatgcctcgttccgaatccccccaggagaaacgccatgaccatcaaagccatcaacgttcgtaaccagttcaagggcaccgtgaaggaaatcatcgaagggccggtgctctccgagatcgacgtgcagaccgccgccgggatcgtcacttcggtgatcaccacgcgttcggtgaaggaactggagctggccatcggtagcgaagtgatcgccttcgtcaagtccaccgaggtctccatcgccaagctgtgacgctggctgcgccgcgcttgcggcggcgagaagggcggggaccccgatggggccccgccttttttcgtcggtgtatcggcaaggccggccggtggcgacggctggcgtgggtcgctatggagcggtcggtagggcgaataaccgctcgcggttatccgccgtgggggcgaccgggacttctcagccccggcgcgacaggggctggcgctcgaaatgcacgccggccaggccggtctgttgcagggcgcggatgttggcgtggtcgtcgccttccgggttgtcgcgcaccgcacggtagtgctcgccgaaggccagcagggtttcctcgaggctgaggccctcgaggatggcgaagcccagggtcttgcaggaaccttcgttctgcccggccgggttgctcacgctgccgttgtcgaaggcgctcggcgtgtagctgtagtgctcggcgatgaacgccagggtgtcggtgaacaggtggtgttcgctgcgcagacgcgcgcggaagtcggtcagggtcatcgaaacaggctcatggtgtctggggcagggttggcaaggggcccggtggcctcaggcgttgccctggctcttggcgaaggcggcctgttgttccgggctcgcttctttctggtacttggctttccactcggcatagggcatgccgtagatctcttcgcgggcctggtcattgctgacttccaccccgaggtcgtcggcggcggccttgtaccacttggacaggcagttgcggcagaaaccggcgaggttcatcaggtcgatgttctgcacgtccttgcgggtctgcaaatgatggaccagggtgcggaaggcggcggcttcgagttccaggcgttgctgttcggtgaggttggctgcggtcatggcggtgtttctcgacgatggctcggggcagggtgaaggcacagggccaggtccggcgatgataagagttggcgcggccggcgggcaacgcttgtgcgcgtcttcgcgcggttcgctcgtcggccgcctcagcggtggccggcgagggtgatcgagaccgactcggcgaagcgcagcgcgtgcggcttgtccacttccacctcggcgtagcgcaccgccgggttctccatcaccaggtcgaggatttcctgggtcatccgttcgagcaaggcgaagcggttctcctcgacgtggcggatgatcgccttggtgatggtgcggtagttcagcgcgtgctcgatgtcgttgacctccacggcgtccgcggccgggtagaggatggtcaggttgatcagcacgtcctgcttgttgaggatttcctcctccttgatcccgatgaaggtgcgcaggcgcaggtccttgacgcggattcgcgccattcccggttccagtcgcggcatgtcacttgctccttccgatcaattgcagaaattcctggcgggtggtgttcgagtcgcggaacgcgccgagcatcaccgaggtgaacatctgcgagttctgcttctccaccccgcgcatcatcatgcacatgtgctgggcctcgatcactaccgccacgccggcggcgctggtcacctggcggaccgcctcggcgatctgccgggtgaggttctcctggatctgcaggcggcgggcgaacatgtcgacgatccgcgccaccttcgacaggccgagcaccttgccggtgggaatgtacgccacatgagccttgccgatgaagggcaggaggtggtgttcgcacagggagtacagctcgatgtcgcggacgatgaccatttcatcgttgtccgaggcgaacagcgcgccgttgacgatttcctccagggtctggccatagccgtggcagaggtactgcatggccttggccgcgcgcttcggggtgtcgagcaggccttcgcgctgcgggtcttcgccgagaccgacgaggatctcccggtaatgctgggaaagtgctgggttcataaggggtccttggcgcctcacttgacgtggcggccgccgttcacggtcagggtggtcccggtgacgtaggggttgtccaacaggtagcgaaggctctggtagatgacttccggccccggttcgatgccgagggcggatttcgccagggtgcgggcgcggtattcggcgtcgtccccgtcgttgaacatcaccagtgccggtgaaatggcgttgaccttgatcctcggcgcgaagcgcgcggcgaacgacagggtcaggttgtccagcccggccttgctcgcgcagtaggcgatacgccgggcgctgcccttgcgcgccacgtcgtcggtgaggtgaacgatgtcggcaggctgcgagcgttccagcagctcggcgcagtgcaggttgatcaggtagggcgcgagcatgtgcacgctgaacagttgctggaacgcctcggcttcgtggccgggcgtctcggcgacccagtccgaggcgttgtggacgatcgctcgcaggctgtcggtatgctgtcggagggccccgatgaaggcgaagatgccggcctcgctggcgaagtcggcgtgcagggtcagcgcgccggcctggcgcagttcgtccagcgccgggcgttcgctgcggtagctgacgatcaccgactcgccgtcggccagcaggcggcgggcgcaatgcaggccgacacgctggctggcgccggtgatcaggatcggggctgtcgccatgggactctcacagcaggcgaagggaatcggatggatgcagggtacccgactgagccagtcgggcaaagccttgcgctacggcccaccccgccggggtgggcggcaagccgtcagtgcgcttccggcaggctggcggcgcgctgcgggcggcggtgcagccagggggcgagcaggcggctggagagagggatgaaccagtaggtcatcaacggagtgaggaccagggtgctgagcagcacccgcgcggccagcgacagctcgccgaggtaggggccggcgccgaggttgaaggccagcgagaccgggaagaacgccagccagatcgccacgctctgcttccagcgcggcggtttgcggttgtcgtcgaaccaggcggcgaggccgtgggcgcggtgctcgcgcggttcgtcgaagagtccctggccgcgttcgagccaggcctggcgcgaggcggagtgggcccaggcggcgagggtggcgtcgtcggcgaagcgaaagatcatctggaattcgtctccgccggcgggcggcgccagcgccccggagccgaggtagccggggaagtcggcggcgagggcttcgccttcgcgctgccaggcgaggaagtcgcggtaacggccggcggcgacgcggcgggccaccagcagggtaacgggagcggtagacatcgtgtatctcctggaacggttgagcgcgcttcgtgggcgccctcggacaacggcgcagcgccgggggtggtgggctgcgtcggaggacaggcaaggatcgttcccgccgtggtggcgaaggttcgctgccgtgtctacggcagcgcgatgacatcccgatgacagggcgcgcaccgaaatggtgcttttgcggcctgtctgcattgattcggtgcgtcccgctcggcgaacgcatgcggcataatgcccggcttacccctgttggcttacggagtgttcatgaaagtcgccattctctccggctcggtctacggcaccgccgaagaagtcgcccggcacgcccagaaattgctgtccgcggccggcctcgaggcctcccatctgccccgcgccagcctcgacgaactcaaggccttcgcccccgaggcattcctggtggtgacctcgaccaccggcatgggcgaactgccggacaacctgcaaccgctgtactacgcgatccgcgaccaactgccggcctggcacggcctgccgggtggggtcatcggcctgggcgattcgagctacggcgacacgttctgcggtggcggcgagcaggttcgcgaactgttcggcgaactgggcgtgcgtgaagtgctgccgatgctgcgcctggatgccagcgaaaccgttacccccgagaccgacgccgagccttggctggccgagttcgccgccgccctcaagggctgatcccgggcgtaccccgccgaggcggcggataaccgcgaggcggttattcgccctgcacggggagggagcaagcggtagggcgaataacgccccaggcgttatccgccgaaacgcctgccgaggcggcggataaccgcgtagcggttattcgccctacacggggaggggacaagcggtagggcgaataacgccccaggcgttatccgccgaaacgcctgccgaggtggcggataaccgcgtggcggttattcgccctgcgcggggagggagcaagcggtagggcgaataacgccccaggcgttatccgccgaaacgcctgccgaggtggcggataaccgcgtagcggttattcgccctacacggggagggagcaagcggtagggcgaataacgcccccaggcgttatccgccgtagcctctgccgagctggcggttattcgtcctacgccgggctttcctccagcggctgctcgcgcagcagctccagccaggcctgcgccgcccgcgacaggtagccgccacggcgccagatgaaggcgatgtcccagcgcaggtccggctccctgagcaggacccgcaccactcccgggcgttcgatctcgcgagcgatcacccgtggtagcagcaccactccctggttggccgccaccagcgcgccgaggaagtcggcctggccgctgcggccgccttcgcgcgggctgaagccggcctccaggcaggcgcgcagcaggcggtcgttgagggtgaagctctgctggtagagcaggaacgggctgtccgccagttcgccgagggcgacgctggcggcagcggccttgggatgcccggccggcagcagcacgtccagcggttcgttgcagaacggctggtagtcgaagccgtcgtccgccggggtgaggctgccggccagttccagctcgccggccagcaccgcctgctccatggtcttgctgccgccttccaccaggtgcacggcgatgttcggatagcgccgccggtattcggcgaagcgttgggcgaacagcgcgtcggcgccgagcagcggcaggcccaggcgcagttcgccgcggttgagctggctgaggtcgtccagttcgctgagcaggtcgcggcgcagccgcagcatctcctcggcgcggcgaaacaccacggcgccggcgtcggtcaggcgcacgtgcggcccgttgcgttccaatacctgcacgccaaggctctgctccagttgggcgacctgcttgctgatagtcgactggctggcgtggcggacctgcgccgcctgggtgaagctgccctggcggaccacttcgacgaagctgcggagttgacggaattccattctggaatggctctcatgcggacaattcgctttggggatgataggccgggccttatcctttctccatccccgatttcccagccaaggcctttcccatgttgcccccgctcgtccgccgtctgtcccgccttgccgccgaactggcggtactcatcgccttctggtgggctggcggctggctggcgaaggccatcggcctgccgctgccgggcggggtggtcggcctggcggcgctgttgctgctgttcgccagcggcctgctgcgtccggcctggctgcaggccggcgccggcctgttgctggcggagatgttgctgttcttcatcccggcgctgatgagcctgctcgactacggcgcgctgctacgcagcgagggctggcgcatcctcctggtgatcatgctcagcaccctgctggtgatgctggtcaccgcggtgtcggtggagtggatgtgccgctggagggcgcgccatgagtctcgataagcaagccctgttctggttggcggcgaccgtcggcggctacctgctgagccgccagctgtaccgccgggtgaagtggtactggctgtcgcccatcgtgttcgtcccggtgctgctctacgccctggcgattcccacccatacccgctacgccgactacgcccgcgacaccaattggctggtggcgctgctcggtccggcgacggtggccttcgccatcccgatctggcagcagcgcgagctgctgatgcgccactggccggcgctgctggccgggatgttcgccggcaccgcggtggccatcggcagctcctgggcgctggcccaggccctggcgctggacggccaggtcacgctgtcgttgctgccgcgctcgatcaccacgccgttcgccatggagatgtcccacgacctgggtggcgtgccggaactgaccgccgccttcgtgatgatcaccggggtgttcggcgcggtgatcggcggcaccctgctgcgcgtcctgcgcttgcgcacgccgctggcccgcggcgcgctgttcggcgtcggcgcgcacggcgccggcaccagtcgggcctacgagttcggcggcgaggaaggttcggcggccggtctgctgatggttctcaccgggctgttcaacctgctggtcgcgcccctggtcgcccactgcctgtagcctgcgcgcataggccggctgaatcctccgccattcagccggcgcgcgagtgtaagcccggcgacagtcgccggaggagggcggggctagactgcgggcatccgataacgacaaaagaggatgccgccgtgaccgccgttcactccctgcccgccgatgtgcaagcccaggtctccgccgccgaatggcagacccgcgtcgatctcgctgcctgctaccggctggtcgccctgcacggttgggacgacctgatcttcacccacatctcggccaaggtgccgggcaccgaggacttcctgatcaacccgttcggcctgatgttccacgagatcaccgcctccagcctggtgaaggtggatgccagcggcaagaagctgatggacagcccctacgagatcaacccggccggctacaccatccatagcgcggtgcacgaggtccgccacgacgtcgagtgcgtgctgcacacccataccgccgcggggatcgcggtgtcctgccagaagcagggcctgttgccgctgtcgcagcaatcgttgttcgtgctctccagcctgtcctaccacgcctacgagggcgtcgccctgaaccatgaggaaaaggcccgcctgcaggccgacctgggggccagcaatttcctgatcctgcccaaccacggcctgctcacctgcggcggttccatcgccgataccttcctcatgatgttcaccctgcaacgcgcctgcgaggtacaggtgatggcgcagagcggcggcgccgagctgatccacatcccggggcagatcctcgccggcgcgcgcgacatgatcgccggggtgatgcgcagcaagaccggcatgggcggccagctcgcctggccggcgctgctgcgcaagctcgaccagcagaacccgggctaccgccagtgaccgcggcgctgcccggcattccactggaggcctggcggaggcggggccgcaccctggatttcaagggcttcccgatccgctactgggaagccgggcagggtcggccgttgctgctgatccacggttttcccagcgccgcctgggactggcactacctctgggagccgctggcgcagcgctaccgcgtgctggtctgcgacctgctcggtttcggcgattcggccaagccgcgcgcccatcgctacagcctgctggagcaggccgacctgcaacaggcgctgctcggccgcctgggaatcgacgagccgctgcacgtgctggcccacgactacggcgacagcgtcgcccaggaactgctcgcccgccatcacgaaggccggctgcggctcgcctcctgcgtgttcctcaatggtgggctgttcccggaaacgcaccgcccggtgctcagccagaagctgttgctgagcccgttgggcgggctgttcggccggctgttcgaccgccgcgccctggcgcgcaacttcgccaaggtcttcggcccgcgcagccagcccggcgagaccgagctggatgccttctggagcctgatcgaaagcaaccaggggcagcgggtgatgcatcgcctgatccgctacatcgtcgaccgccgcgagcagcgtgagcgctgggtggcggcgttgcagcacggcggggtgccgttgcgggtgatcgacggcgccgtcgacccgatctccggggcgcacatggtcgagcgctaccggcaactggtcgccgatgccgactgcgtgctgctcgatggcatcggccattatccgcagatcgaagcgccggcggcggtgctcgaacattacctggcgtttcgcgcccgactggatgattcagagttttcttaagcgagtttgagattgcagcaagtgccatcgcgcaaggatcggggctagggtgctggcgcctcgctggacgaggcgtttcgtcacccatggaggtctccatgcacgatcccgtttctcccttgcgcgcgttcgacgagggctcctggttgttccgccagatggtgcaggcgcaaccgttcatccgccagtccgggatggtcctcgccgaactcggcctgctgctggcgctcgggctcggctacctgtgctggcaggaaggcagtcgctggtacgccgtcggcgccggcctcgcgttgctcggcagcctgctgctggtggtggtccggcacaactacgactggtggctgttcaagctcggcccgcgtggccggctgtacattccgttcgactgaagcggaacatcccgctgccttatcgggcgccattcatggcggcgcgaagccttgtccccgccggcgggctggccgacactcgggcaatccttcctactgccctggagtcccgaacatgagcgatgccctgcgtttcgacgaccaagtcgtgatcgtcaccggagccggcggcggccttggccgcgcccacgccctgctgttcgcgaagcatggcgcccgggtggtggtcaacgacctcggcggtagcacccatggcgaaggcgccagtgcctcggcggcggacaaggtggtggcggagatccgtgccgccggcggcaccgcggtggccaaccacgactcggtcacggacggcggcaggatcgtggagaacgcgctggacgccttcggtcgcgtcgacgtggtggtcaacaatgccggcatcctgcgtgacaagaccttccacaagatggaggacgccgactgggacctggtctaccaggtgcatgtcgaaggcgcctacaaggtcactcgcgccgcctggccgcacttgcgcgagcaggcctacgggcgggtggtgttcacctcctcgacctcgggcatctacggcaacttcggccaaagcaactacggcatggccaagctcggcctctacggcctgacccgcaccctggccctggaagggcgcaagaacaatatcctggtcaacgccatcgcccccaccggcggtacgcggatgaccgaggggctgatcccgccgcaggtcttcgagcagctcaagccggagctggtcagcccgctggtggtctacctcggcagctcggcctgcgaggatacctcggggctctatgaggtcggcggtggctggatcggcaaggtacgctgggaacgcagcctgggcttcggcttcgatccgaaggccggcttcgacgccgaggacgtggccgcgcactggcagcagatctgcgacttcgagaacgccgcgcacccggcggacaacgtcgaggcgctccgtgaaatgatggccaacctgcagaagcacgcgctctgagacgcccggcggatgcggcgcggccgcggcaaaaggactaaggtgaagaccggctgacgccggtcttctgccatccggccggtgtcttttttcgctttttccgcagggagtctgtcatgagtgtcatcgtcgaacgcaacggcccggtcaccaccctggtcatcgctcgccctgagcggcgcaatgcggtggaccggccgaccgcccaggccctggccgacgccctgcgcgagttcgaagcggacgatacggcgcgggtcgcggtactcaccggcagcggcggcaatttctgcgccggcgccgacctggcggcggtggccgaggatggcgagcggcgcaatcgcctggaggcggagggcgacggaccgatggggccgagccgcatgcagctcggcaagccgctgatcgccgccatcgaaggctatgcggtggccggcgggctggagctggcgctgctcgccgacctgcgggtgatggccgaggacgccatctgcggagtgttctgccggcgtttcggggtgccgctgatcgatggcggcagcgtgcgcctgccgcggatcgtcgggcagggccgggcgctcgacctgatcctcaccgggcgtccggtgaaggccgacgaagcgttgcagatcggcctggccaaccgggtggtgccgagcggttcggcgcgagccgaggccgaggagctggcggcggaactcgccgccttcccgcagacctgcatgctcgccgaccgcgccagcgtatatgcgcagtgggaactgtccttcgacgtggccctggccaacgaattccagggcgggctggcggtgatcgagagcggcgagaccctggagggcgcgcagcgcttcaaggacggcgaggggcgccacgggcgcttcgagtgacgccgtcgcgccgcccgggctagcggtggatgatcacgtagctcttgcgcacggtttcctgcacatcccacacgccgagactgttctccggcagcagcagggcatcgccggcctcgatgcggatggtctcgccgccgtccggggtgaaggtgcagcggccttgcaggaagtggcagaactcctgctcgacgatctgccgccgccagcgtccgggggtgcattcccagatgccggtttccacctggtcggtgcgctccacggcgtaggcgcgggtctgcgcgaccggctcgccaaggggcaccgcgaccgggctggcggcgccaagatcggcgccggcggtatttttcagaagggtcagggccatgcggtttttcctctgtgggaggtggaggggattctcagcgcatcaggctttccatgccggccgcgagggtttgcgccaggctgcggcgccagggcgcgctgtgcgggtcggcaaggacccggtcctcatggacgaaactgcggatgatcgcgttgtagccgagccagcggcagggttccggttcccagcgggccaggctgtccagcggacgctcgcccagcacccagggctgccgcagcagctcgctgtcctcaccgaggatcagcgcggccagggtgcggccgccgaggttgctggcgccgaccccttcgccgccgtagccgccggagagggcgatgccactggcgcggtcgagcaacatgtgcgggcggaagcgccgggccatgccgaggttgccgccccaggtgtggctgatcctggcgtccttgagcagcgggaagagttcgccgaacaggtagcgacgcaggccgacttcctcgtcgtcgaggctgaagtcgctgcgcagcttgccgccgaagcggtagccgccccgcgcgccgaaggccaggcggtcgtcggcggtgcgctggccataggtgacctggcggctgaattcgctgaaggcctggccgcgctccaggccgatctccgcccagaccgacgacggcagcggctcggtggccaccagcagactctgcaccggcaactggtagtggcccagcggcggcaggctggcggcgtagccttccactgccggtacgatccattcggcgcgcagttcgccgcgctcggtgcgcagcaggccgcgttgccagtgcagcacccggctcttctcgaacagccgcacgcccaggcgctccaccgcgcgggccaggccgcgcgcgagcctggccggctggatggtggcgcagtgcggcgaatggatcgccccgtagctgccggggatgcgcaactgctggtcgagttcctgcggcgtcagccagcggtagtcgctttcgtccaggccttcggcatagagatcatgcagataggcgcgcaggcggcgttcctgttccgggtagcgcgccgcgcagtagagcacgccgcccttgcggtagtcgcagtcgatgccttcctcttgcagcacccgcgcgacttcgtcgggaatcccgtgcagcaggtcgtagccggcccggcgccgctccggcggcaagccggcgagcaggccgtcctcgccgagcaggttgcccatcagccagccgccgttgcgccccgaggcgccgaagccggcggtttctgcctcgacgatggcgacgcgcaactgcggcgcccggcgcttcaggtaataggcggtccagaggccggtgtagccggcgccgacgatggccacgtcgacctcgagggattcttccagggacgggcgcgcttcgagcggatcgtccagttgattcatccacaggctgaggtggcgccaggccgacatagagggctccatagcgagagggaagggggaatgcggcgagagtaggaagatgctgtgcgcctgtcgtgcgcgcgggtccgctgggaaatctcagaggcgcgacgacaggcgcttcaggtattcgcgcggagactggccggtgtgctggcggaagcagcggtagaaggccgacagcgaattgaagccggcggcgaaggccagttcgtcgacccgtccgggcagctcgccggaaagctggccgagcaggtgttgcaggcgggtctggttgacgtactggtagaagctcaggccgagcacctggttgagcaggtaggaaatctggttgcgcgtatagccggtggcattggccacctgggtcaggtccaggtccggatcgagatagggctgggcctgttggaagtagtgctccaggtcgcgcgccagcaggctcagctgcttggccgaaagccccaggcggctggccggcggccggccgtcgccgccggcctgggctccgccgccgctttcgtggaccagcgaggcgtattcgttgatgcgccagatcaggccgtcgcgcacggtgatcgcctcgctggcgcggaacgaagccaggcggccgctgagggtcacccgcaggcggtactggatgaaggcggtatcgccgtcgaagcggatacggtcggtgtgctccagcgactcgtcggggcccttgggcatggtcgcctcgacgtactcgcggagatcggccaggcgcatccggcggttctggaagaagtcgttgtattcgacctcgggatgatagagcgccatcaccgcgtcgatgtcgcggtgcttccagctgaggtggtagcgcatgaccgtctcgcgggtggcgtcggcgaggtcgcggtcggcgggaatggactgttcgggctgcatgcagcgaaggatgccatcgccgccgccggcggaacagtgccgcgccgtcatccatgcactggatgacggcgtatccatcctgcatatggcgttcgccgaggcgctttccagggcccctgttcactctttcgggcgacagccggaatacctccttggtgcgcttaccgccgttcgggccgctgggtagggtgtagccacctcgaccctgtcaggagagccgcatgacaacaacaaaaaggcgcggaatcttccctctgcacgcactcgctgcggccacagccctgggttgcgccacccaggcctcggccgtgtcattcaacatcggggagatcgaagggcaattcgactcgtcgctgtcggtgggggccagctggtccatgcgttccgcagacaaggactacatcggcacccgcaacggcggccacgcctcgtcgcagacctccgacgacggccggctcaacttcaagaagggcgaaaccttctcgaagatcttcaagggcatccacgatctcgaactcaagtacggcgacaccggcgcgttcttccgtggcaagtactggtacgacttcgagctgaaggacgaacaccgcctgctctacgacatcgacgaccacaatcgcaaggagggcgccaagtcctccggggcgcagctgctcgatgccttcctctaccacaactacagcatcggcgacctgcccggcagcgtgcgggtcggcaagcaggtggtgagctggggcgagagcacgttcatccagaactcgatcaacagcatcaacccgatggacgtcgccgcgttccgccggcccggcgcggagatcaaggaaggcctgatcccggtgaacatgctctacctgtcccagggcatcagcgacgcgctgaccgtcgaaggcttctaccaactggaatgggaccagacggtgatcgacaactgcggcaccttcttctccaccaccgacgtggtcgccgatggctgcgagcggatggtctacgccggcagcgacttcgacccgaacccggccaacggctaccgctacctgccgcgcgccggcgatcgcgatgcccgcgacagcggccagtggggcctggccctgcgctggtacgcggcggagctgaacgacaccgagttcggcctgtacgcgatgaactaccacagtcgcaacccgtactacagcgtgatcgccggcaacggcctggccacctccgacccggtcaccgggcgctccaccggctattacttcatcgactatcccgaggacatccgcctctacggcctgagcttccagaccaacatcggcagcacctcggtggccggcgagctgagctaccggccgaacatgccgctacaaatcaacagcaccgacatgtcgatcgccgcgatctacccgaccaccctgttcggcaacccgatctacgacagcggcttcgccaccccgcgcgccggcgaggtgatcaacggctacgtgcgcaagccggtgacccaggcacaggtgaccgtcacccagttcttcgaccgggtactggcggccgaccgcctgaccgtggtcggcgaagtcggctacaaccacctcagcggggtcgacggcgacgacctgcgctacggccgcgacgccatctatggcatcggcgaactgccgaacaacgccttgtgcaccggcgcgctcaacgtggccaacccgcaggagtgcaacagccacggcttctacacccgcaactcgtggggctatcgcctgcgcgggatcctcgaatatcccaacgtgttcgccggggtcaacctgaagccgaacctggcctggtcgcacgacgtcgagggctacgggccgaacttcagcgagggcgccaaggccgtcagcgtcggcctcgatgccgactaccagaacacctataccgccagcatcagctacaccgacttcttcggcggcaactacaacccgatcaacgaccgcgacttcctcgcggtgagcttcggggtgaacttctgaggtccgccgcccctcggggcggccgctttcgcggatacgaacaaggataacgacgcatgaaaacagcacgactcctgtcctccggggcgctggccctcagcctgctggccggttcggtgacggcggcggtttcgcccggcgaggccgccaagctcggcagcagcctgacccccatcggcgcgcagaaggaaggcaacgccgacggcagcatcccggcctggaccggcggcctcgcggccagcgccggcaaggtcgatggcaagggcttcctttccgatccctttgccgacgagaagccgctgttcaccatcaccgcgcagaacgtcgagcaatacaaggacaagctctccgacggccagttggcgatgttcaagcgctaccccgagacctaccggatcccggtgtacaagacccatcgcacggtggccctgccggccgagatcgacgaggcggtcaagcagagcgcgctgaacgtgcagccgatcaacgacggcaacggcctgtcgaatttcgagaagagccgctactacgccttcccgatcccgaagaacggcgtcgaagtgctctggaaccacatcacccgctaccgcggcggcaacctcaagcgcatcatcgtccaggccaccccgcagaccaacggcagcttcacgccgatccgcttcgaggagtcggtggcgttcccgcagaacatgcccgacctcgaccagagcaaggcggccaacatcctcaccttcttcaagcagcaggtgaccgcgccggcgcgcctggcgggcaacgtgctgctggtccacgagaccctcgaccaggtcaaggagccgcgcctggcctgggtctacaacgccggccagcgccgcgtgcggcgcgccccgcaggtggcctacgatggcccgggcaccgccgccgatggcctgcgcacctcggataacttcgacatgttctccggcgccccggaccgctacgactggaagctggtcggcaagcgcgagatgtacatcccctacaacgcctacaagctcaacgacccgaccctgaagtacggcgacatcatcaaggccgggcacatcaaccaggacctgacccgctacgagctgcaccgggtgtgggaagtggtcggcacggtgaagccgggtgagcggcacatctacgccaagcgccacatgtacatcgacgaggacagctggcagatcgccctggtcgaccactacgacggtcgcggccagctctggcgggtcggcgagggccacgcgcagtaccactacgaccagaaggtcgccggctacaccctggaggcgctctacgacgtgatcgccggtcgctacctggcgctgggcatgaacaacgaggagaagcgcggctacgagttcggcttcaaggcctcgtccgccgactacacgccggccgccctgcgcaacgccggggtacgctgagtcccggccagtcgcgacgagcgcgtcggcttgtgccgacgcgctcgtgcgttatgacggcccatcacccggcgcaatcatcgttcagcagcggggcaggcgcggtctaggctcccggcaaggcgcttcgacagaacaagagcactgccatgaccgagccgaccgagctgcccgccgccttgccgcggctgccgccgcagcacctgccgcggccccgtttgcaccagccgctgctgcgcggcgaatgccgcctgcgactgctctgcgcgcccgccggcagcggcaagaccgtcctcctcggagaatgcgcgcggcgggcgccgcctggcgtgcaggtggtctggctggcgctgggcggggaagcgctggaccccgcgaccttccgccgccgcctggccggcgccctcggcttgcccgaggacagcgacgaagcgcagctgtgccggcggttgcgcaacgcatccgcgctgtggctgctgctcgacgattacccacggcaccccgaccccgccctcgacgcctgcctcgatcgcctgttgagcgcggcctcgccacgggtgggctggtggctggcgagccggcggcggccgcagtgcaacctggcgcggttgctgctggaaggggagttgctggaggtcgacggcggcctgctggcgttcgatgccgacgaggtcgccgaactgctccgcctgcacgggcgcagcgccgatgccgctgcgaccggggcgctgctggaacgcagcggcggttggtgcgccgcgttgcgcttgcgcctgctggtcggcgaagagacggccggaccgttgttgcaggaatacctccagcacgagttgctcgacgagctgccgccgccgctggccgacgccgcgcgtgccctggcctggctgccgcaagtcggtccggagctgttccgccggctgttcgaggagctgccccacgggctggacgacctgttggcgcggggcttccccctgctggccgatgcgaaccagcgctacagcctgccgccggcgatccgcgaggcctggcgcgaagcgccacagcgcccgcagcgggacttccaccgggaagcctgcgaatggttcgccgaacacggcgagacccgcgaggcggtcgaccaggcgctggccgccgacgaaccggaaaccgccgccggattgttgcagaagctcaccgaggagcaattgctgcacggccacaacatcggcatggtcctggccctgcgcgacgaactgccggcggcgctgctggccagcacgccgcgcctggtgatcctgaatgcctggacgctgctctacgccggacgcctggccgaagccgaggactgcatcggccagttggcgcgcttcctgccgatgccctcggcgtcccgccagcgggtgctgctggcgcaatggcagggcttgttcgggatcctcctgcactgccgcggcgagcgcggcgccgccgactacctgcgcgaggcgctggagcaactgccggaggacgcctggtcgcagggactgatctgccgctcggcgctgatgcaactggcgatgatcgaggggcggatggaccaggcgcggttgatcggccgcgatgccttgcgcctggcgcgcgagcacgacagcctgatcttcgaggcgctgatcgaactggagcgggcgcagtggctggagcagcgcggcgaactgctgcgcgcggaaggcgtcctcgatcgcgcccagcgctacctggaggacctcggccagcagggcagcccgatgctcggccggatcgccctgcgccgcgcgcgcctgtgcctgcagcagggccgcgaggtcgaggccgggcactggtatcggctggggctggagcaggcacgggagaatctcgatccctgggcgctctacggctacctgggactggccttgctggaggccgggcagggcgacctggacgcggcgttcaaccgcctgctggaggtcgagcggctgatgcagcagcgccatgtccccgatccgctgtatcgcggcgcgctgctgctggtcagctccgccctgaccctgcagcagggaaggccggcgcaggcgcgggagatcctgctgcgggtccgcgcctacttccagccgggacgggcgcgcctgtcgccgccctccgaaccggagctggaagcgcgggtagagcaccaattggcactggccgaactctacagcggcgaggcagccgccgccgaagcgcggctgcgcgggctgctcgccattctcgaggcgcaggggcggcagacgctgctttgcgaagtgcgcatgggtatcgccgagtgccagttcctctccggacaattgccccaggcccagcagaccctgcgcagcggcctggagctggcggagcggctgggcctgcaactgccgcagcggcgactgcgggatcgccagccgcaactgttcgccgccctgccgggggaagaagaggaggggctcagtccgctcagttgccgggagctggcggtgctcggcctgatcgcccagggctgctccaaccaggagatcggcgagcaactgttcatttccctgcacacggtgaagacccacgcccggcggatcaacggcaagctcggggtggcccgtcggacccaggcggtggcgcgggccaaggccctcggcctgctcgcctgagcggcctcagtgcagggcgcggctggtcggcggggcgagttcgcccaggcgctggccgaggcgcagttgctcggtgggatcgtcgctgagcaagagcgcgcgttccaggtcgtagcgttccgcctgcgggcaatccagttgccgatagaggccggcgcgggcctcgtggtcggcggcgcccaccgggccgagttcgatcacccgctgggcatccttcagcgcggccagcggctcgccggcggcgctgtgcagttgtcgcaggttgcgcgacagacgctggaggatttccccgggagaggcctgcttcaggtaggcggcttgcagttcgctcttcggcccttgcaggcgcagcagcagttcgcggcagtcgggggtatagaggcgtcgcccggtggccgggtcgagcagatggtcggcctgcggcacgcgcagcaggaagcgtcccgggaagttcactccgaccagcggaatgtccagccgccgcgccagttccatggccaccagcgccagcgacaacggctgtccctggcgccgctgcagcaccagcgggagcagggccgagcgcggttgcagggggaagtcgtcgtcttcgcagaaaccctgttcgctcattcgccgcagcaacccctgggcgcgctcgctggccgaggcgcggtcgtccaggctggcgccgatctgccggacgagttcgtcgagctcgcgcagggcgtgggcgggcgaatacgccgggaggtgctccgcggcgatccacagggccgcctcgaacagcgctggcggttcctgggcgagacaatcgaggcaggcttgacgcgggtccatggctttcctcctggtgcgcctggatcgctgcggacgggccgttcggagcacgccggggccggtttcgagcgggcggaccccaaggttgtaaccgtccgccgaagcttcgtccagtacccggctcggcgagcgccgccgcctggtcgtcggccttgcgggcgtttcgccgacgcctgcctatactgaaggtgccgggcggcaacggcccggcccggacaacaagcagcaagcaggggagccccagcatgttcgacatgatggacgcggcccggctcgagggtctccacctcgcccaagacccggccacgggactcaaggccattatcgccatccacagcacgcgactcggcccggcgctgggtggttgtcgctacctgccttaccccaacgacgaagccgccatcggcgacgccatccgcctggcccagggcatgagctacaaggcggccctggccgggctggagcagggcggcggcaaggcggtgatcatccgcccgccgcacctggacaatcgcggcgcgctgttcgaggccttcgggcgcttcatcgaaagcctcggcggacgctacatcactgcggtggacagcggtacctccagcgccgacatggactgcatcgcccagcagacccgccacgtcaccagcaccacccaggccggcgacccctcgccgcataccgccctcggcgtgttcgccgggattcgcgccagcgcccaggcgcgcctcggcagcgacgacctggaaggcctgcgggtcgcggtgcaggggctcggccacgtcggctacgcattggccgagcaactggcggcggtcggcgccgagttgctggtctgcgacctcgatcccggccgggtgcaactggccgtcgagcagctcggtgcccatccgctggcgccggaggcattgctctccaccccttgcgacatcctcgcgccctgcggcctgggcggcgtgctcaccagccagagcgtcagccagttgcgctgcgcggcggtggccggggcggcgaacaaccagttggagcggccggaggtcgccgacgagctggaggcgcgcggcatcctctatgcgccggactacgtgatcaactccggcggcctgatctacgtcgccctcaagcaccgcggcgccgacccgcacagcatcaccgcgcacctggcgcggattcccgcgcggctcaccgagatctatgcccatgcccaggccgaccaccagtcgccggcgcggatcgccgaccgtctggcggaacggattctctacggcccgcagtgacgggccggcgtttccggcgaggccgccagcgggcctcgccagcggcagtgcgggccacccccgccgcgccgcgcgtgcacgccgccacccgcggcgcgaccctgagcggcacgcctacccggcgtgcggaggaggtttgcgatggttcacaaccggatcgacccgcctttcacccgctacctcgacagcgacggtcggcccctcggcgagttgcccgcctgggccggcgacagcgatgcgctggtcggcctctaccggcagatgctcctgacccgcctgttcgaccagaaggcggtggccctccagcgtaccgggcggatcggcacctatgcgccaaccctcggccaggaagccatcggagtggccatcggcagccagatgcgcgccgaggacgtgctggtgccgtattaccgcgataccgccgtgcaattgatgcgcggcgtgcgcatggaggacatcctcctctactggggcggcgacgagcgcggcagcgactacgccgaaccgctggcggcgcaggactttcccatttgcgtgccgatcgccacccaggccctgcatgcctgcggggtcgcctcggcgttccgcatccgcggcgaacaccgggtggcggtgaccacctgcggcgacggcgccaccagcaagggcgatttcctcgaggcgctgaacgtggcgggcgcctggcagttgccggtgctcttcgtggtcaacaacaaccagtgggcgatctcggtgccgcggcgcatccagtgcggcgcgccgaccctggcggagaaggcggtgggtgccggcttccccggcgaacaggtggacggcaacgacgtgctggcggtcgccgaacgcgtccgcgcggccctggagcgcgcgcgccagggcaaggggccgaccctgctggagtgcatcagctatcgcctctgcgaccacaccacggccgacgacgccagccgctaccgttccgccgaggaggtcaaccaggcctggcgcgaggagccgatcaagcgcctgcgcgccttcctcgccggccgcggccagtgggacgaggagcgcgagcaggcgctggtgggcgagtgccaggcgcgggtgcaggaggcggtggagcgtttcgagacgttcgccgcgcaggcgccgcaggcactgttcgagcatgtctacgcgcgctggccggcggtcctggaggagcagcgcgagcaattgctggagcgcgccgcgcggcggcagggaggggccgaacatgaatgagcgcaacggcgaagcgaaacgcctggcccttctggaggcggtcaacctggcgttgcaccgggccatggccgaggacgagacggtggtggtgctgggcgaagacgtcggggtcaacggcggggtgtttcgcgccaccctcggcctgcgcgagcgcttcggcttcaagcgggtgctggatacgccgctggcggagaacatgatcgccgggctgtccatcggcatggccgcccagggcctgaagccggtgatggagatccagttcatgggcttcatctacgccgccatggagcaactggtgtcccatgccagccgcctgcgcaatcgcacccgcggccgcctggcctgcccgttggtgctgcgcacgccgatgggcgcagggatccgcgcgccggagcaccacagcgaggcgaccgaggcgatgttcgcgcacatccccggcgtccgcgtgctggtgccgtcgtcgccggcgcgggcctacggcctgctcctggcggcgatcgacgatcccgatccggtgatcttcctcgagccgacccggctctaccggatgaacccgcagccgctggcggacgacgcccggcgcctgccgctggacagttgcttcacccttcgcgaaggcggcgacctgaccctggtcagctggggcgccagcgtccacgagacccagcaggccgccgagcgcctggcgcagcgcggcatcgaggccgaagtgatcgacgtcgcctgcctcaagccgctcgacctcgacaccctcgaagcttcggtgcgcaagaccggtcgctgcgtgatcgtccatgaggcgccgaagagcggcggcctcggcggggaaatcgccgcgagcctctacgagcgcgtcctgttcgatctgcgggcgccgatccagcgggtcgccgcggccgatatcccgccgccgctgtaccgcctggaaccgctgtacatgcccgccgtggaggacatcctggcggcctgcgacaccgtgctcggctacgcctgagccgaggggagacgaccatgaagcacttcaagctgcccgacctgggcgagggcctgcaggaagcggaaatcgtcgaatggcacgtcaaggccggcgacagcgtgcgcgccgaccagcgcctggtctcggtggaaaccgccaaggcgctggtggacatccccgcgccctacgatggggtggtgggcaagctgttcggcgccgagggcgacatcctccacgtcggcgaaccgctggtgggcttcgagggcgaggaggcggacgccggtaccgtggtggggcgcctggagggcggcggtagcgccctggaggaccgtttcttcatcggcgccgcaccgtccacccgcgaacacctggcaccgcgcgcgaccccggcggtgcgccagttcgcccgccagcagggcgtcgaactggccggcctgagcggctccggcccggatggcctgatcacccgcgccgacgtcgaggccgccgcccagggcgcccgcgaacgcttcggcggcgagcgcttgcgcggggtacggcggagcatggcgctgaacatggcgcgctcgcatgccgaggtggtgccggtgacgatctacggcgacgccgacctgcatcgctggaagaccgcacgcgacccgttgatccgcctggcccaggcgctggccgaggcctgtcgcgccgagccgaccctcaacgcctggttcgatggcgcctcgttgtcgctgaaactgcatgagcggctcgacctggggatcgccgtggacaccccggacggcctgttcgtgccggtgctgcgcgacgtcggtgcgcgttcggcggaggacctgcgcgccggtatgcggcgcctgcgcgaagacgtccaggcacgctcgatcccgccggcggaaatgctcggcgcgaccctgaccctatccaacttcggcaccctgttcggccgctacgccaaccccgtggtggtgccgccgcaggtggccatcctcggcgccggcggcatccgcgacgaagtagtggcctggcgcggcgagatggcgatccacccgatcctgccgctctcgctgagcttcgatcaccgcgcggccaccggtggcgaggcggcgcgtttcctcaaggtactggtgaacgccctggagcagcccgacggctgatcagcgccggcgctccagccaccatgccagcagcgcgccgagggcataggcgagcaggtcgaagccgtcggcggtgctgccgagaacgatgcgcagcacggggctggagaattgccaatgcagttgcgccgccaggtactggcccagttccagcagcgcgccgacggcaaaggcggcggatgccagccaggcggccggcgccctgagcgcgctgcccatcaggtagtagagccagaccaccgccagcaggtcgccgccgaagctgcgtatccagccccaatgccggcccagggtggcgagcaggaccagcaggccgaacagcagcagtgccagcagcaggctgcgccggtccaggcgccagcgtcgggagcggacgggggaggcggggagagcgggcatggggccttcctggtcgatgggggtcggacaagcgccgcgcggactcagcggcgtcgcaggctggcgagcaactgctcgacgaaggcgtcgctgccggagctgtcgaggtagtgcacctggggaccgtcgagcaggtagagcgcgtggtagggcttgccggcctggctgccgcgcaggcgatagacctcggtgccggccacgcggtagcggctgacgctggcgcgccggtcgcacaggccgagggcctggcgctgcgcctggagacgctcgcgctcggcgtcgggcaggccgtccagcggcagggctccgaacagcaggcgaacctgtcgcggaaggtcgagccgttcgccctcgtccgcgcccatctcgttgccttcgagcaggcggtgggcgaggtaatgaccctcggcgtagcgagcgatcagcaggtcgccgctgtgcagcagggtggcgggggcccgttgcaggtcgagttgcagcctgccggcgccgcccagggccaggacctgcgcggcgccggcagaggctgccggtgtctcggcgtccgtggcccggaacgggcaggcgagggcaggggcaccggcgaggccgaggaggacgcacagcaggccggcaagttgtcgcggcatgtttcggctccttgcgctttgcttgcagcggcggctcattcgtccgcggcgttttcctcgaacagttcgttgagggcgtccggctggttcttgaaggcgcgggcgaaggcgtcgcggttcttcgccatgaagatgccgagttcttccacctgttcctccttcagcgacggcaccgccttctgcagcacctcggccagcgtttccgccagctccagcatcttgtcgtaacgatcggcttcagccttgtccatgaacaaacgctcctgatcccggctgctgcggtacaccacttcgacggccattcatcacctctgtgccttctgagtcgcaaggttgctttgactggttatccatacagtatatggcgtcttgccgtccgtggatagcgccaggattgccggcgcattgccagggcggtcgtcgtctgacagaaatgtcacgccgggctcatgagcctgacagtctccgcagcgtagtttcaggctgaacgttctaccaaggagacatcctcatgagagtgatcccgttggcacttgtcgcgctgctcggcctggcgccgctggcccaggcgcagcagcagccctacggacccaacccggactcgaaatcgctccgccagcactacgtggaagggcgcctggacatcgcccgggtgatctacaagaccgacctgtggagcgcctgtgggatcgtcccggcgcgcctggtctacgaggactcgcagggcgagcggcataccgtcgagtacaaggcctggggcagcggttgcagcggcaattgagcgaacccggtgcggcacgggccgcgccgggttttcctcggctcccgcgcttctgctaaggttgcgcgcctgccgcccgttgcgcggcgcataccttccgccccgcaaggatgcccggcatgcaagacttcggtttcgcccttctgctcatcggctacgtctggtccgtggccagcggcggccgccgttcgatcccctgcgcattgctctgcctgctgctgtttccgctggcgcaactggccttcgccatcaacgacgcgccgatgcgcccgccgctggcgctggcggcccttggcgcgggcctggcctgcctcggcggcggctcggtgttcggctgagcccgggcatctcacaagaatacgattgaaaatcattatcataaaaaatatgctgctgcccttctgaaaggacgtgggtggatgcgccgttggcggagcaggatctcaaggcactgtttctcaggcatgcccggcagttgcagtcgtatctgttgcgcaagacccgtgatccacacctggcggcggacctggcgcaggaaagcttcctgcgcctggccgagcagcggcacaaggagccgatcgagcatgtcgacgcctatctctaccgcaccgcgcacaacctcaccatcgaccattaccggcaggaacggcggcgccgcaccgagacccggcccaacgacgacctcgccgggttcgtcgccgaccagcccggccccgaggagtccgcggtggatgccgatgcgcttgcccgcctgcgcgagatagtcgccgaactgccgccgcgcacccgtgagatcttccgtctcaaccgtctggaggggctgacccatgccgaggtggcgagacgcctggaaatctccgatagctcggtgcagaagcacctggcccgcgccctggcccatgtgatgcaggcactcgaggattcccgctgaatggattaccgagtcttgccggttcgcgcgtctgaacctctataacgaccaacgagagccgcacgtgaacagcccccaggaacaacagcagatccgccagcaggccgccgaatgggcgatccgcctggacggcggcgacctcgaccggtcccggcgcgaagcgctggacggctggctggcggctggcccccggcacccggccgcgctggcgctggcgcaacggacctggaaacagctgggatcgctggccgaaccgcggacgatggttcagacgccggttgccagcgcgccgcgccgcgccggggggcggcgcaaggggtggcgcggctgggccgcggcggcggcggtgctgctggccctgggcagcgcctggagcgaacgcgacgccggcgtgacctggctggccgaccactctaccggcaagggcgaggtacgcatcctgcggctggtggatggcagcgaggtcgagctggacgcacagagtgccatcgatgtcgcctacgacagccgcgagcgacgggtgcgcctgctcgaaggcagcgcgatcttccgcgccgccccccgcgcggggcgggagacacggcccttcgtggtggaaagcgccggcggcagcactcgcgcgctgggtactcggttcctggtcagccgcaacgacgacggcagcgtccaggtcggggtgctcgaacaccgcgtcgcggtggccctggcgcatccgcgcacggggaccgtcgggcgccgcgagctgggtgagggcgagagcctgcgctacagcgcggagggcggcgtcgaggcgccgctgggcggtcgcctcgacgacctgaccagttggcggcgcggcctgctggtcttcgacgagcagccgctgggcgaggtggtggcgcgcctcaatcgctaccggccggggcatttgctggtggctcccggtgcgttggcgcagcggcgggtcagcggcgtattccgggtcgccgacctggaggcctcgttgcagtcgatcagcgatgagctgggagtgcgcagcctgggcctggcgggagtgacgctgctgtactgagcggcgcgatcgcttccgagagcctcgaccacgggccgggcagtcgccccgcgcgcttgttccggcaggggccgggaagcgcattttcgagccgtggatcccgccggcgaaaaattttctcgatttccgttactgactttccctgcctccatcgttctcttaacgagactgattcttattacacaaaacgatggagtgtaggcgctgtcatgaaacatcgtggatggagtgccgtgcgaggcggtcgcaagggggcgcaactggccctggggctgggcctggtcctgctgggaacggccgcgctaccgctgcatgcgcaagacggggcggactcggcgagccagcagcagaccgcgctgcgccgggtccggctggacatcccggcacaaccgctgaaccgcgccctgctgcgattcgccgagcaggccggggtccaggtgttcttcgacagccagcgtttcgccggtctcggcagcgcggcggtgcacggcgaatacgtgctggccgacggcctgagccagatgctccagggcagcccggtggaataccgcttctccggcaaggaccaattgagcctgatccgcgtcagccaggacgacctggtgcagatgtcgccctcggtgatctccgccgcgcgtccggacgactgggtctaccagacgccgcattcggtcagcgtgatcggccgcgagcagatcgagcgcaacccgccgcggcatgccgccgacatgctcgaggaaacccccggggtgtactcctcggtgagccagcaggaccccggcctgtcggtgaacatccgtggcatccaggactacgggcgggtcaacatgtcggtcgacggcatgcgccagaactaccagcagagcggccaccagcagcgcaacgggacgctctacgtcgatcccgagctgctcagcgaggtggtcatcgacaagggcgccagctcggccatgggcggcgccggggtgatcggcgggatcgccaacttccgcaccctggaggcccgcgacctggtcaggccgggcaagcaggtcggtggccgggtgcgcctcaccagcggcctgggcggcgacgccaatggcacccacttcatcggcagcgcggccttcgccatcggcaccgaggtctgggacatgctggtcgccgccagcgagcgccacctgggcgactacgacccggggaccaagggcagcattggcgagctgcgcaccggcgcctggttcaatcccgaggccgggcagcgggtcaagcattcgccggtggcctactccggctatgtgatgcgctcgcgactggccaagcttggcgtcgccctgccgcaggaccagcgcctgcagttcagctacctgaccacccaggtgtcctacgacgacgccaacatgctcaacaccgagaaccaggcgctctgggaaaagctcggcagcagcgacgtgcgtgcgcagaacttcgccatcgactacggctacgcgccggacaacccgctggtggacttcaaggccaagctctactacgtcgacaaccgcaaccgccagcagaccctgcaacgcggtatcacccccggctactcgatcacctaccagaccgacacctacggcgcgcaggcgcagaacacctcgaccttcgctctcgacgagctctccacgctgcgcgccaactatggcctggagttcttctacgacaaggtgcggccggactccagccagccgcgggcgagcacctcggcggtcggcttccctgcggccgaaggcatgacccccaagggcgaccgcgccctcggtagcctgttcgcccgtctcgactacgactacgacgactggctcaacctcaacgccgggctgcgttacgaccgctaccgcctgcgcggcgacaccggcttcaacgcgcgcaccttcatccttggcaccacccgacagaccgacatgccgctgcaatacgccgtcgaccgcgaggaggggcgcttctcgccgaccttcggcctgtcggtcaagcccggtgtcgactggttgcagctgttcgccacctacggcaagggctggcgcccgccggcggtgaccgagagcctgatcaccggccgcccccacggcggcggcgcggaaaacatgtaccccaacccgttcctcagtccggagcgctcgaaggcctgggaagtcggcttcaacgtgctgaaggagaacctctggttcagcgacgaccgcctgggcctgaaggtcgcctacttcgacacccgggtcgacgacttcattttcatgggcatgggcatgcagccgccgggctacggcatggccgggatcggcaacagcgcctacgtcaacaacctcgacagcacgcgcttccgtggcgtcgagtaccagctcgactacgatgccgggctggcctacgggcagctctcctacacgcacatgatcggcagcaacgacttctgttcgaagaccgcctggctcggtggcgtcacccagacggtgaagggcagcggtcgccgcccgccggtgatcgacatgcggccggacgagcaggccaacgccgccacccattgcagcgcggtgctcggctccgccgaacacatgccgatggaccgcggctcgctgaccctgggcatgcgcttcttcgaccgcaggctggacgtcggcgcccgtgcccgctacagcgaaggctactcggtggctggcggcgccacggtgtcgcaggccggcgtgtacccggcggactggaaggaatacaccgtctacgacctgtacggcagctaccgggtgagcgatgaactgaccctgcgcctggccatggagaacgtcaccgaccgcgcctacctggtgccgctgggcgacgtgctggccttcaccctcggtcgcgggcggaccctgcaaggcaccctcgaataccagttctgacccccgttttgcccagtgaagggcaaaaccggagcgggcatccgtgcgctccggcattcaccactcgttgaattggagttttggcatgagcatttcgatttcctacagcaccacctacagcggctggaccgtagcggattacctggcggactggtcggcctacttcggcgacgtcaaccatcgtccgggccaggtggtggacggcagcaataccggcggcttcaaccccggtccgttcgacggcagccagtacgcgctgaagagcaccgccagcgacgcggccttcatcgccggcggcgacctccactacaccctgttcagcaaccccagccacaccctgtggggcaagctggacagcatcgccctcggcgacaccctgaccggcggcgcctccagcggtggctacgccctggacagccaggaggtgagcttcagcaacctgggcctggattcgccgatcgcccagggccgcgacggcaccgtgcacaaggtggtctacggcctgatgagcggtgacagcagcgccctgcaggggcagatcgacgcgctgctgaaagcggtcgacccgagcctgtcgatcaactccaccttcgaccagttggccgcggccggcgtcgcccatgccaccccggctgcggcagcggcggaaatcggcgtggtcggcgtgcaggaactgccgcacgacctggccctggcggcctgagcaactgtccacgatagcgttcgtggactgcttgcgctaaaggccggagaggagttggcgctcctctccggcgcacgaaccgccgtcgctgcgcctcgcacccgtggcgacggcggcccccggattgttcctccgccggccgtgcccggcaagcggagactgccgcaatgtcctccgggcccgctcgcggcccggacacccacaggacccgactccgatgaagctccggccggcctcgccgcgcaatgaaatcctcgccaccctcggccgcttccgcccggcgctgcgcagcgtcgcgctgttcaccgcggtgatcaacctgctgatgctggcgccgtcgctgtacatgctgcaggtctacgaccgggtgctcggctccggcaaccacatgaccctgctgatgctgaccctcatggtgctcggcctctacctgctgctcggcgccctggagtgggtgcgcagcctggtggtgatccgcctcggcggccagctcgacatgcaactcaaccagcgcatctacgacgcctcgttccgcgccagcctggagcgcggcgagcaggccgtcgggcaggcgctgaacgacctgaccagcctgcgccagttcctcaccggcaacgccctgttcgccttcttcgacgcgccctggttcccgctctacctgctggtgatcttcctcttcagtccctggctcggcctgctcgccctggttggggcgctgctgctggtgctgctcgcctgggtcaacgaaagccgctcgcgcgaaccgctggccgaggccgggcaactgtcgatcctcgccacccagcaggcctcggccaacctgcgccaggcggaaaccctggcggcaatgggcatgttgccggccatgcgcgcgcgctggttcgcccagcaccaggccttccttgcccggcagaacctcggcagcgagcgcagcgcggcgatcggcgcgacctccaagggcgtgcgcctggccctgcagtcgctggtgctcggcctcggcgcctggctggcggtggaaggcctgatcaccccggggatgatgatcgccggctcgatcctgatgggccgcgtgctcagccccatcgaccagttgatcgcggtctggcgccagtggagcggcgcgcggcaggcctaccagcgactggcgcggctgctcgaggagaatccgccggctgccctgggcatgccgctgccggcgccgcgcggcgcgttgcgcgtcgagcggctctgcgcagccgcgccgggacgcgagcaggcattgttgcaggacctcggtttcgccctggagcctggcgaagcgctcggcgtgatcgggccgtccggttccggcaagtcgaccctggcgcgcttgctggtgggcgcctggcagccgctgtccggcgcggtgcgcctggacggcgccgacctgcggcagtggagcgcggcggcactggggccgcacatcggctacctggcccaggacgtgcaactgttcgccggcagcatcgccgagaacatcgcgcgcttcgccgaggtggatgccgagaaggtggtggcggcggcgcgcctggccggcgtgcacgacctggtgctgcgcctgccgcagggctacgacacgcgccttggcgacggcggcgccggactctccggcggccagcgccagcgcatcggcctggcccgcgcgctgtacgggcgaccggcgctgatcgtgctcgacgaacccaatgccagcctcgacgaggcgggtgaggcggccctggccgaggccatcgcggcgatgcgccggcacggcagcagcctggtgctggtcacccacaagccggcggtgctggcgctgaccgacaagctgttgttgctgcatggcgggcgcctgcagcgtttcggcgcgaccgccgaggtgcttgccagcgcctcgccgccggccgctgcggccccggcgccgacacggccgacgccggcgttcggtttcggctaccggccgggaccggggatgccggtcggcggtgtgccgggaggagcggcgcgatgagcgggcaggcgcggttgcgcgaagtcggcgccggcggcgcggcgctggaactggacgagaagcgtttttcccggctcggctgggggctggtgctgctcggcttcgtcggctttctcctgtgggccgggttggccccgctggacaagggcgtcggggtctccggcacggtgatggtggccggtagccgcaaggccgtgcagcaccctaccggtggcctggtcaggcacatccgcgtgcacgaaggcgagcgggtggaggcaggacaggtgctgctggagatggacgctacccaggcccgggcccaggccgatggcctgttcgcccagtacctggcggcgctggcgagtctggcgcggctgagcgccgagcgcgatgaaaaggcgcggatcgagtttcccgccgagctgctggcgctggacgacccgcgcctgccgaccttgctggaacagcagcggcagttgcacgacagccgtcggcgggcgctgcgcctggaactcgatggtctcgccgagacggtcgccggcagccaggcgcaactggacggcctgcaagccgcgctgcgcagcaaggagcagcagcgcgccgccctcgaggaacagttgcgcggcctgcgccaactggccagcgagggctacgtgccgcgcaaccgcctgctcgacagcgagcgcctgctggcccaggtcaacggcgagatcgccggcgatctcggcagcctcggcagtacccgccggcagatcctcgaactgcgcctgcgcatggcccagcggcgggagaagttccaggaagaggtgcgcgccagcctggccgacgcccaggtgcgcgccgaggagttgcgcaatcgcctggccagcgcgcgcttcgacctggccaacagcgaggtacgggcgccggtcgccggcctggtggtcggccaggaagtgttcaccgagggcggcgtgatcgcgcccggccagcaactgatggaaatcctcccggagcgccagccgctgctggtggacgctcggctgccggtggagatggtcgacaaggtccgcgtcggcctgccggtggagctgatgttcagcgccttcaaccagagcactacgccgcgggtggagggcgaagtgaccctggtctcggccgaccgcctgctggacgagcgcagcgaggcgccgtactaccgggtgcgcatccgcgtaggcgaggagggcgtacgtcgcctggccggcctggagatccgcccggggatgccggtggaggccttcgttcgcagcggcgagcgctcgctgttgaactacctgttcaagccgctggccgaccgtacccacctggcgctgggggaagaatgaatcgcctgcgagcctgcctgctgtcctccgcgctgctttcggcctcttcggcccaggcgctgggcctgctggacgcctaccaactggcggtgcgccacgacccgaccttccaggcggcgctccacgagcgccgcgccggcagcgaaaaccgcgccatcggccgtgccggcctgctgccgagcctgcgctacgactacaacaaggcgcgcaacgactccaccgtcagccagggcgacgcccgcgtcgagcgcgactatcgcagctacgcctcgaccctcagcctggagcagccgctgttcgactacgaggcctacgcgcgctaccgccagggcgaggcccaggcgctgttcgccgacgaacagttccgcgggcgcagccaggaactggcggtgcgcctgttcgccgcctacagcgaaaccctgttcgcccgcgagcaggtggtcctggccgaagcccagcggcgcgccctggaaacccagctggcgttcaaccagcgtgccttcgaggaaggcgagggcacccgcaccgacctgctggagacccgcgcccggctgagcctgacccgcgccgaggagatcgccgccagcgatcgcgcggcggcggcgcggcgtacgctggaggcgatgctcgggcaggcactggaggatcgcgaactggccgcgcccatcgagcgcttcccggcgctgcgcctgcaaccggcgaccttcgaaggctggcgccaggtggccctgcaacgcagcgccgagctgggcgcccagcgccatgcgctggaggcggcagcctacgaggtggagcgcaatcgtgccggccacttgcccaggctcagcctctacgccagcagcagcaagacgcactcggcttcggaaagcacctacgagcagaaatacgacaccgacagtgtcggcctgcgtctcagcctgccgctgttcgagggcgggcgggtgtcggcagcgacccgccaggccggcgacaagtacgcccaggcccaggccgagctggatgcccaggtggccagtgtgatcaatgacctgcacagccagttcgacctgaccgccagcagcctggccaaggtgcgtgcctacgagatggcggtggcggcggcgcgcgaacaggtgacagcgacgcggcgcagcgtcgccggcggggagcgggtcaatcgcgacgtgctggacgccgaacagcagttctacggcgcccgccgcgacctggcggaagcgcgctacgcctacctcaacgcctggctgcgcctgcgccagctggcgggggtgctggaagaccgcgacctggcggtgctggctgcctatttcggtgccggcgaaggacgcgcgcaggtcgccgctgccatcagatagctatcggccagcgtgccttgccttgggtcatcgcctgcaacagttgcggcgcgctggtgccgttttcgatggcgatgccgaagcggatgctctcgatcatccgctgcaactgctccaggtcatgcagttgcgccggtcggatcaggcgcttggcggcgaccccgcgttcgttggagagggtgaggacgatgctgccgtccggccgctccaggctgaggttgacccggtactcggcctggaaggcctcggtgaggagctggaaagggctgctgtcggtcatggcggaccacctgaatgctgtcgtgctggttgggactgggtaccgcccggaaagttctttgtcaccgccgggctgtaccctgcgccgacgtgcggacgtctatctgcgcacgtgccttggcctgggccttgcacgcttcgggccaggtggccgtcgtctttgtcgggagaagctatgaaacagaattgggccgagcgcctgcgcgcaagcatgcaccaccaggcggagagcctcggcaacctgctggtggaggccttccactacctggccctgttcgccatcggcgccacggtgttctgggcggcgggcgcggctttcctggggatggtgaacaaggggcatgcgtcgatcgacgacatcctcctgctgttcatctacctcgagttgggcgcgatggtcggtatctacttcaagaccaaccacatgccggtacgcttcctgatctacgtggcgatgaccgcgctgacccgcctgatgatcgccgacatccagcacaaccatacgccggacgatggcatcatcctggtctcggtggcgttgctgctgctggcgctggcgatcctggtggtgcgcttcgcctcggcgcgcttcccttcggcgaagtccgacggcgccgccgcgcggcgggtggcgagcgaggacgccgaaggggaagcctgattcgtcgccgcgccggagccggtctccggcgcgcttccggccagcgcaacggcctggcaatgtactaccatcgcccggtcgtgttcaggaagcctgccccatgaagggatggaaactctttaccccgttgctgatcctcgcgatcgtcgccatcaccctctacctgcgcctgcacaatccgcccctgctgttgcagggcgaggcggacgccaccaacgtcatcgtttcctccaaggccaagggccgggtccaggtgctgcacgtgcggcgcggcgacgaggtgaagcagggcgacctgctgatcagcctcgacagccccgagctggaagcccagctcgatgccctgcacgcggcgcgcaaccaggcccaggcgcagctcgacgagtcgctccacggtacccgcgaggagagcatccgcgcgctcaaggccagcctggcacaggccgaggccgagttgcgcaacgccgagtcggatttccagcgcaaccagcagatggtcgagcgcggcttcctctcgcggacccagttcgacctctcgcggcgtgagcgcgatgtcgcccgcgaccgcgtcgccgaggcgcgggccaatctcgacgaaggcctcaagggcgaccgcgaggagcgccgccaggcgttgcaggccgcggtgcgccgggccgacgcgcagatcgccgagctacaggcgcagatcgacgacctgcaggtgcgcgcgccggtcaacggcgaggtcgggccgatccccgccgaacagggcgaactgatcaacgcctacagtccgctgctgacgctggtgcggctggacgacagctacttcgtcttcaacctgcgcgaggacatcctggccaaggtgcgcaagggcgaccgcatcgtcatgcaggtgcccggcctgggcggcgccgaggtcgagaccgagctgcgctacatcgccccgctgggcgatttctcgaccaggcgcgcgacccgcgccaccggcgatttcgacctgaagaccttcgagacccgcttctacccgttgcagccgacacccggcctgcgcccgggcatgagcgcgctgtggcgctggacgaactgagcgatggcgtgggccgcgctgaagcgcaacgccagccgtttcgtccaggcgttcaacaccgagacgcggatcgcctgccgcagctggaccatccactggctcggctggtgctggccgctgctgctgttcggcgtgatcagcggcgtctaccaggccggtaccctgctggacatgccgctggcggtgatcgacaaggaccatagccaactgtcgcgcaagttgatccgcgaactcgacgcgacctcccacgcccaggtgatcaccgttcccgccggcgtccaggaggggctcgacgcgatccgtcgggccgatgcatacgccttgctctacatcccgccggacttcgaggccgacgtgctcggcgggcgcgcgccgaaggccgagctgtactacaacgcgctgctgtattcggccggctatgccgccacccaggacttctcggcgctggtcgccagcctcaacggcgaattgcgtccgcgcctggccgccgggatgccggcggcgctgccgcacctggcgagcatcagcgtgtcctacgacagcctgttcaatgccagcggcaactacatctattaccagcagttcgccgccatcgtgcacctgctacagctgttcgtgatcgtcaccatggtccatgtgctggcccgcgaggcgccggaactgcgcgcctcctcgccgcacatcctgcgggccaaggccctcggcgtacgcctggtgggcaaactggcgccctacacactgctgttcaccgcgctgctgatgctggaaatcttcctgctggtggcgttctccggcgcgcgcatcaacggcagcccgctggcgatgctgatgatcacgctgttctacgtgattgccgcgcagagcgtcgggctggtgctgttcgtcttcaccgccaaccgcttcaccgcctattcgctggtgggcatgctgatcggcgtcgcccagacctactcgggagtgctgatcccggaactggcgatgccgaccctggcgcgggtgatcgccgaggccgagccgctgacccacaccctgcacggcctgttcgaccagttcctgcgccaggcgccgcccagttcggcgctctacacctgcgccaagctggcgctgtacccgctgatcgcctacatgatcgccaagatgcgcctgcgcagccgcctggacctgagcccgatatgaagaactacctgcagatcctccgggaaaccctgaaggccatgctgtccaagccgatgtggctgatggtcgtggcctcggtgtgcatcacctcgctgccgtacatgaaccacaccgccctcgacctgccggtggcggtggtcgacgaggatcacagcgacgtgtcgcgcgagctggtccggctgctcgattcggcgccgaaggtcgccgtggtcggctacgacagcctgccgcaggccaagcgcgacctggcctggcgcgagctgtacgcgatcatcgtgatcccgctgaacttcgagaagcgcctgctgcgcggcgaggcgctggtgatcccgtacttcggcgatgccaccaaccgcatggccaacggccagatccagcaggacatctcggcggtctacagcgcgctgaccaaccgctacaacgctgccctgctggaacgcgaaggcttcaccgcgacccaggcgcaggtggtgctgagcccgctggtagggcaattgaccgacctgttcaaccccggcatcagcttcgccgccatcgtccttccggggttgctgtcgctgatcctgcaacacagcctgctgctcggctgcacccgcggcaacatcatgctgcgcggcggcaccccgcgctacatgcgccagccgctgtcgacccgcttcggccgctacagcgcgcaactgctgatctggaccgtgctggcgatgctcttctacgtgatctggccgcacctgctgggctatcgccagtcggcctcgttcttcatgctgctggggatcgtcctgccgttcctgatcgcggtgatcgccctcagcgagttcatcgccgagctgctgcccaccgaggaatcggtgtacctgaccatgaccttcatcaccctgccgctgttctacatggccggctacagctggccggaacaggccatgccggactgggtacgctggctggccgacgcgatcccctcgacctgggcgattcgcgccatcgccgagatgaaccagatggacctgccgctgcgcgaagtcagcgaccatgccctggtgctgctgggcatggccgccacctatgcgttgctgggtacgctgctgtaccagtaccgcaactggcgctgggacaacgtcaagggttggtgaagcggcgcaaggccggccatactcggctggcgttcgcacagggagatgaaggaatgtttcgttcggggctttctttgctggtgcttctggggctcgccacgctcggcgggtgcggttccgtcaacacgctggtgcgcgacgacgccagcgccgcccacgacctgcgcctgaaggcgaccgcctgcaccagcctgccgcgggtgtacagcggggtcagctacaccttctgccggctcaacgtgaagaccgggtcgccggtggcgccggcgcaagccgacggcatcctcgaggtgctggccctcgacttcgcgctgtccggggtgatcgacaccctcgcgctgccctatacctcgtaccgccagtaccgcgacggcaacctgtccctggccaactgagtcagggaatcagcggcagcacgatctcgtcgctgcggctgatcccggcggtctcgctacggcacaggtcgaggaactcgcgcatggtcgcggtctggtacttctgcttgtgccagatgaagtagaactgccggcgcaggtccaggccgggcgtttccaccggcaccaggctgccgcggcggaaagcgtcgcgcagggccaggcgggaaatgcagccgatgcccaggccggactccacggcacgcttgatcgcctcggtgtgctccagctccaggcggatgttcagcggccgcgggtgatgacgcatggcctggtcgaaggtcaggcgggtgccggagccctgctcgcggaggatccaggcctcccgcgtcagccgttccaggtcggcgccgccccgccgcgccagcggatgctggggggcgcagaacaccaccagttcgtcctccatccagggttgcacctcgatgtccggatgccggcagtcgccctcgatcaggcccaggtccagctcgtagtgggcgacctgctgcaccacctgggcggtgttgtgcacgtgcaggcgcacccggcagtccggctggcgctgcatgaaggcgccgatcagcagtgtggccaggtagttgccgatggtcagggtggcaccgaggtcgagggagccgaaggcggtcttgccgttgagcaggttctcgatttcctcgccgcggtcgagcagcgccaccgcctgcggcagcagttggcggccgagggcattgagggtcaggcgcttgccggcgcggtcgaacagcttgcagtcgaactgccgctccagctcgccgagcgaggtgctggtcgccgactgcgacagcgacagcccctcggcggcacgggagacgctctcctgctgggccacggcgacgaacacctcgagctggcggagggtgaatttcatccaggcttcctcgtctagagcgaaaggccccgcgacattttgccgttccgtcggcggggttggctcggttatccttgcgccccgtccgcgggagcgatgggagccctcggcggccggcggccgaccgatatcgtgttatcccatatccatattctggataagcattatccagacaattcattttgcggatattttggcaaccgataaaatgccgcgcaactgcgtcacgtctgctgctgttggtgtgcgcccgcgttttcctaggagtctttgatgagcaatctgtacaccgagcgcgttctcagcgtgcaccactggaacgacaccctgttcagcttcaagaccacccgcaacccgggtctgcgcttcaagaccggccagttcgtgatgatcggcctggaagtcgacggtcgtccgctgatgcgcgcctacagcattgccagcccgaactacgaagagcacctggagttcttcagcatcaaggtcccggacggcccgctgacctcgcgcctgcagcacctgaaggaaggcgacgagctgatggtcagccgcaagccgaccggcaccctggtgcacgacgacctgctgcccggcaagcacctctacctgctcagcaccggcaccggtatggcgcccttcctcagcgtgatccaggacccggaaacctacgagcgctacgagaaggtgatcctggtccacggcgtgcgctgggtcagcgaactggcctacgccgacttcatcaccaaggtcctgccggaacacgagtacttcggcgaccaggtgaaagagaagctgatctactacccgctggtgacccgcgagccgttccgcaaccagggccgccagaccgacctgatgcgcagcggcaagctgttcgaggacatcggcctgccgccgatgaatccgcaggacgaccgtgcgatgatctgcggcagcccgagcatgctggaagagaccagcgccgtgcttgatagcttcggcctgaagatctcgccgcgcatgggcgagccgggcgactacctgatcgagcgcgccttcgtcgagaagtaggcctccgccgcgcctcgtcgcgccaggcgaagaaagcccctgccgtatccgcggcaggggctttctgctttccggcccccgctcagtgcgccgggtgccggtgcgggtggtcgccgcccacgccttgcagtaccgcctggtcgatctcgtcgaagcgcagtacccggccgccttcctcggccgccaggcgcgtcgcggcctcttcgtcggcgaacgaggcgagggtggcgcccatgccgcccggccgctggatgccgaccacgtagtaggcgcgggtggcgtcgatcaggcgggcatcgtcggggtgccgccagtcggcctggctcatgtcgtggacatacaggcgcgcctggccctggcggttttccggttgcagccaccagccgaacagttcggcggtggagcagaacttgcgcaccgcgccgggaagcaccgcctcgcccttgggaccgggcatttcctcgatgagcatgccgcagacgtggcattcgtcgccgctggcgatcggcaccgggccgagtgccgtggcgtcgtcccgcgacgcatcgcagccggccagcagcaggccaagcaggagcgtgccgagcagagggcgcagggggagggtatgacgttgcatggcggaacctcgtgagtcagatggggcggcggcggaacaggccgtgggccagcgccagggcagcgcaggcccagagggccagggccagccagagggcgctggcggacaccggcaggtcgctggccaggggaaccaccccgccggcggcggctgcgtcgaagccggacaggttgatcagccggtagaggtcggtcgggttgagcagcaacagccagggcagcagccgcgggctcaggtgaccctggctgaggaccaggatcgccagcagggccaggtcgaacagcaggacgaagaagaaccacaggccgagcgcctgcccggcggcgctggatttctcgctggcgcggctgctcagggcgtaggccagggcgaggaacacgcagccgagcagcagcgaggaacccatgaagcggccgaaggcgcccagcaggatggccgcctcgacctccggcaccagcgcgaggatcgccagcgccgcgctgccgaagccgatcagggtggccagggcgaggatcaggccgtgaccgaggaacttgccgagcagcaactggccgcgccccagcgggtaggtcaggagcagcagcagggtgccgccttcctcctcgccgacgatggcgtcgtaggccagcagcagggcgatcagcggcatcaggaaggtggccaggctggtcaggctggcgaccgtcgccggcaccgaggtgaagccgacctggccggccgcggcggcgccgaaccaggcgatgcccaccgagagcagggcgaacagcaggctgatcgccagcagccagcgattgcgcaggccgtcggccagttccttgcgggcgatggtccagactacgggcatggcgtggctccggcgggggcgggggacatgtggtggcgatagaggtcctccagcgacggcggcaggatttccaggtcgaactcgcgcgcggccagcagcgcttccagcacgccgtcgcgctcggcatcgtccagcagtacctcgatgcgctggtcgtccagtctccgcgccgccaggccggcccggtgccagcgttcgagccactgcgggttatgcgggctggccaggcgcacgcgggtcggcagagccgccttgcggcgcaattcggcgaggctgccggccacttgcaggcggccgccggcgagaatcgcggcgcggtcgatgtgcgtctcgacgccgggcagcacatgggagcaaaggacgatcccggtgccctggccgcgcaggcggtcgagcaattggtagagctcgacggtggccagcgggtcgaggcccaccgtcggttcgtcgagcagcagcaggcgcggttcgccgagcagcgcctgggccaggccgaggcgctggcgcatgcccttcgagtaggttttcaggcgccgcctggcggcatggccgaggccgacctgttccagcaggcgcgcggcttcggccggcgccacgcccttgaggcgggcgaagtggcgcagggtttccgcgccgctgagctgcgggtagaaggtcacgttctccggcaggtagccgagctggcggcgcgcctccaggctcctcgcatcgtggccgaggacccgcacgcggccttcgctgggggccagcaggccgaggaccagcttgatggtggtggtcttgccggcgccgttgtggccgagcaggccgagcacctcgccgggctccaggcgcaggtcgagcccgctcagggcggtgagggcgccgtagcgcagggtcgcgccgtcgatctcgaccaggctcatggcctcggctccgcggcgggcatccgcatcagcggatggctgtcgcgcacgccgggcgagcgcaccaccgggaaggcgcgctggacccagcgcagcagctcgatgctcgggctgttcaacagcaggcgtacctgcgggtacagccagatcagccggtcgacgttgtcgttgggctcgtaggcgacgtcgccgagaccgtcgtcgtcgcggtcccagcccaggtagtcgctccagtagttgccgcggccgtcggcggaccactcctgctcgcggctggcgacgtacttgacctgctggcggttgcctatgaaggcgttgccggcgatgcgattgtcctccgagccggcggtgaggtggatgcccagggcgctgtcggcgaagctgttgccttcgatgcggttgaacagcgagttgtagatgaacagcgccttgccctcggcgccggaaatcatcgcgtcgccggtgctgccgctgcgcacgccctcgacgcggttgccggccagggtcgagtaggtgatgtagttcatcaggatgccgtagttctcgtcgtcgatggagcggttgccggtcacggtcagcttgcggctctgcatcagcgcgtagccggtgcgggtgcgccgggtcaggttgtcggtcacccggctgttgtgggtgaacatgtagtgcacgccgtagcgcagctcctcgaagcggttggcttcgatgctgctgtcgttggaagtgtcgatgtagaccccgtcgcgggtgtggctgacccggttgccgcggaccagagcgtccttcaccgcatagaggtggataccgttgccgcgatcctgggagcgcacgctttcgtcgccctcgatgcggttgtcgagcacctgcgcgcccgccgtggcgtcgagccagacgccgaagcccgcgccgcgcaggtcgttgccgcggatcacggcgccgctggcggccttgccgacgaagatcgcggcgtcgagttcggtcaggttgcgcccccagttgcgcagccggcagccctcgacggtgatcccggggctggtcagggtcagcaggctgccgtggccgccgccgtccagttcggcgccggcctcgcagcgtaggtgcagcggccggtcgatgacgaagttgccggcgtagcggcccgccgccaggctccagcggccatcgccgtcggcccgcagcggcaggccgtcgaccggctccgcgcgggccgtggcgaggccgagcaggagcagggcgaggagcggccccgcccggcgcccggccagcgaccgcgctgcgtggatcaagccttttccaccagcatccgcccgcacatttccatgtgcagggcgtggcagaaccagctgcagtagtaccagtgcaccccgggcttatcggcgacgaaggtgatcgacgaggtctgttgcgggctgatctccatgcagacgccgtggttgaccatgacgaagccgtgggtcacgtcctcgatctcgtcgaggttggtgatggtcacggtgacttcgtcgccctgcttcaccttgaactcggtgaggccgaaggagggcgccatcgagaccatgtagacgcggaccttgttgccctcgcggatgaccttgttgtccttcatcaggtcgatgccgtccttttccgcgcgcttgaccgtctcggcgaagaacgggtccttgcggtcccagatcttgcgggtcttgatctggtcgcggcgggcgaggatgcaatcgtgcggttcggcgaaggtcgggccgtcgtggaccagcttcatttcctcgccggaaatgtcgatcaactggtcgttctccgggtgcagcggaccggtgggcaggaagcggtccttggagaacttgctgagcaccacgatccacttgccgtcggcttcgctggtctcgcacagggtggcgtggttgtgccccggctggtactgcacgtcgagtttctggcggatgtagtcgaccttctcgcccttgtaggcgcgcaccgcgtcggccaggttccacttcaccaactggctgtcgatgaacagcgtggtataggcgttgcctcggccatcgaaagtggtgtgcagcgggccgaggcccagttccggctcgcccaccaccacgtcgcgcgggtcggccagcttgccggcgaacaggtcgccgaggcgctcgatggcgatcatggtgcaggtcggcgagagcttgccgttggcgatgaagtacttgccgtccggcgaggtgttcagcccgtgggggttcttcggtaccgggatgtagcgggtcaccgggctgtccttgccgtccttgcgccggccgtcgaccaccggcaccttcgagtcgccgagggtgacgaagcgcttcgccttgatctcggcctcgatgcgcgggatgtcgaacaccaccacccagtcgcgctcgttgcgcatcatgccgccgaggtcgacggccttctccgagttgtagcaggtggaggcggcgaacctgccgctgtagtccatgtcggtgttgtcgaggttgccgtcgacgatcacctgccaggccacttccatggtctcggcgtcgatggcgttgtacagggtgaaggcgttgtcgccggacaggtcgaaggtcgagccgtcgttgggatgggggatgatgaactcggcgttgcagaacacgtagcgggtatgcggcaccttttgcaggcgcaggccgtggatcgcctggacgttgggaatggtgacgatgcggtcgcatttcatgacgtccaggcggatgcgcgcgacccggctgttggccttgtcgttgatgaacaggtacttgccgtcgtacttgccgtcggtcatcgagatgtgcggatggtggcagtcgccgttgaggaagcgcgcgctgtcgccgaggacccgcttgctctcgttggtcaggccccagccggtggccgagtcgacgttgaacaccggtatgcgcatcagctcgcgcatcgacggcacgccgagcacgcgtacttcgccggaatgtccgccgctccagaacccgtagtactcatccagttcgccgggggcgacctcggccttgctgcgctcgcccttgcccgcggcccgggcctcgcggccgaccaccgcgctgcccagggcgctggcgccaaccagggcggcggctccggtcagcgccgaggcgccgaggaagccgcggcggttcaggccgtgggtttcttcgtgggggcttttcgtgtcgtcgctcatctcgtgtcgtcctcaagggcagtcaggggaaagggagccaggtcagaggttctccgcgggtatccgcgcgttgtccgccggcgcgctcttcgcgcgcttcttgcgcttgttcaccagcggcgggcacttgtcctggtcgtggtaggtcatctggcagtcgaggcagtagtggcattcgttggcctcgatgcggccgtcgggatggatcgcctggatctcgcattcgcgggcacagagctggcagggcctgccgcattccgcgcggcgcttgagccagtcgaacaggcgcgccttggccgggatcgccagggccgcgcccagcgggcagaggtagcggcagtagaccttgcgggtgaacaggttgaccaccagcagcgcgacggcgtaggcgacgaaccaccactggcggtcgaagccgagggtgatggcggtcttgaacggctccacctccgcggcctgctcggccagcgccagggattccagggagagaccgaagagcaccagcaggatgatgtacttgatcgcccagagccgctcgtgcacggcgaacggcacctggaactgcggcacgcggagcttgcgcgcgagttcgttgagcagttcctgtagcgcaccgaacgggcacagccagccgcagaacacgccgcggccccagagcagcaggctggctgcggtgaaggtccagaggatgaacagcagcgggtcgctgaggaacagctcccagcggaagccttcgaagagcgcgtggacgaaggtcagcacgttgaccaccgatagctggccgaggctgtaccagcccaggtagaccagggtgaacgccaggtagccggtgcgcagtcgctgcatcaggcgcggccgtcgcaccaggcggtcctggaggaagaggatcgccaggagcaggacgagggcggtacagaggaccccgacctggaaactcttctggtaccagacccgcagccacagcggccgggcagcctcttccagggcggccagttcctcggccgttggctgcggccgctccaggtattcctcgggcgtctggcaggccagctcgaagctggtgaatacccccgccaccgggccggtctggcgccgcacgagcaactccagggtccagggcgagcccggatcgaaacgctggctggcgcgggcgacgaagatcgccatctcgcggaactccggcatgccttcggcgtagacgtccgacaggcgctggtagtcgaggtcgcggaagctgatgatgtcgccgaactggcgcagttggacccgatcgaagatgccaccgcgcacgtagccggaacccttgaaggaatactcgccgtcgccgagcacgacgaaggcgtattcgcctggcttcagcgacgccatcagttcgcggtactggttgtcgccgagcaggctgcggcccaccgcgggagggttgagcagggcgctgtagagatcgatgaacggctcgtcgcggtgcgccgcgtcggcttcgccgatgccttcggcctcgctgcccttgaaggcgtcgtcgatctgcccgcgactcaactgcaggcggcggatcgcaccgttgccgagcaattcgctccagctcgccgtcgctgccggttgctggcgcacctgcgccggtttgggccgcacattgccgcggtcctcgatcaggccgagggaaaccgccaccgtatgtgcggcgcgcatgacgatctcgttgaccaccatcaccgtcaccgtggcgccgctcaccgcgtcgacggtaaccgcctgcgggtcgctggagcggccgaccaccacccgctggtcggcgcgcacgccgtcgtacctggcgctgaaggcgtgcagcttctcttccgggatgccgatcagcaggatcggttcgtggtgttcgaggacgtaggcgtcgcggataaccgcctgcggatcgaggatcacctgcaggttgatcggcttgccggagtaggccgggatgtcggtgacgctgagggtctggaaggcgtagccgagggtttcctcgcccttgctcaggcggcgtacgccgtagtcgccttcggggtcgccgatccgctcgaccgcggggaatacctgggcgatgcgcaggcgctccaactcgctgagttcggcaccctgggcggcgaggccgaccagcaggagcatccaggcgaagacacaccgccacgatccggcggaaaaacgaagggcgcgcataggttccatctactactggctaccggcgaaaaaagggacgccgcgctgcggtggggtctgcgcctggcggtggaatcgcttccgttgccggatgctaggaggagcgggggcggaacgcgcttgatgaaagtcaagaagtggagatgaggaacaagcgaggttgctggcactcagtgtaccgagtcgcccctctcccttcagggagaggggagagggctgcccgaggctcaggccaggcgttgcccggataccgctggatggtacagcggctgcaccttgttgcccgccgggtcgagcaggtggaagctgcgcgcgccgtcgccgtggtcgaagggttggtcgagcagggtcacgcccagcgccttcaggtaacggtaccaggcctccagttcctccacgctgtcgacgacgaagccgtagtgatccatggtctgcaggccgttgctggcagcgtgggcgcggccgagggaaaggttgtcgttgccgcaggtgagatacaccaggtcttcgttggcgcggttcagcacttccatgcccagcacgtcgacatagaagcgctcgcattcttccaggttgggcaccagcagggcgaggtgacgcaggccgttgaggcgggaggggcgggcagggcggtcggacatgggtttgcttccttttttgtatacaataattttgtaaatctaaaacaaaaggaagtttccgtgtactgcatctttatcaagacccgcctcaggcccggctgcgccgaggctttcatcgatgccatccaggtcaacgccgccgcttccgtgtccaccgagcccggctgcctggtgttcgacgtttcccgcgaccgacaggaccctgacctggtctatctctacgaggtctatcgcgatgacgcagcctacgaggcgcacacccgcaccgcgcatttccgcgacagccggccgttggtcgagccgctgatcctcgaacaggaagtcttcgaaagcgacgcgctggcgctcaatccgctgcgctgagaaggctcagtcgccgccggcgacgtccagcacgcggatcaggtccgggcgcgggtagtgccaatgcacgtcgaggtcccacaggcgcaccccgtagcggcgcccgggctccggcttctggtaggccggacgtgggtcctgggccaggcattgctcgatcagctcggctaccggctgccgcaaccgctggccgtgctcatgggcctggcgccgcgcctgctcgctccactccacggcgatgcccggcggcggcgcgtcggcgatgccgttgcgggcgtcggccacggcgtcggcgtagggtacgtagggcttgatatcgagtaccggggtgccgtcgagcaggtcgattccggacagccacaggcgccccgcttcgaagccctccaggcgcaccaccgactggccgatgccgttcggccgatgggtggcgcgggtggcgaagactcccagcgagcggttgccgcccaggcgcggcgggcgcaccttcagtcgcggcttgtcttccagggcctggtggaagaggaacagcagccagacatggctgacctgctccaggccttccagcgcttccacctggtcgaacggcggcagcagttccagggtcccccgcgccgccggcgcgagcagcggctggcgcgggatggcgaacttctccatgaagcaggagcggatgtagccgatgggagaaacgctgtgggtcatggcgggacgaggcgagcggtcgggggcgtcatgttacccggattggcggcgctcagagatgaaaaccgccgtcgatggggatcacgttgccggtcatgtaggcgccggcggtgccggccaggctgatcgccagcgccgccatctcctccgggcgaccccagcggcccatgggaatcgacgcgctgtccgcctccagtgcctgcgggtcattggcgatgtgacgggtcatgcggctcggaaagcgtccgggagcgatcacattgacattgatgtgctcgccgaccagttccttcgccagcatccgcgacagttgatgcagcgcggccttgctcggcccgtaggcataggcttgttcgcccatggcgctgatgcccgccaccgagccgatgttgatcacccgcgccgggttctccgcgctggccgagcggcgcagcagcggcagcagttgctggatgcaggaaaacaccgaggtgacattgagctgcatgaccttttcccagccggacaccggatagctttccagcgctgcgccccaactggtgccggcgttgttcaccaggatatccagccgcgcgctgagtccgccgagcgcctccgccaggcgccgggcaccggcttcgctggaaaggtcggcggggatcgcctggcagtcgccgtaggccgagaggcgtgtggcggtgtcggcgcaggcctctgcgtcacgtgcgcagatgaagacgcgggcgccggcttcgagaagaccctgggcgatcatctggccgatgccgcggctgccgccggtgaccagggcgacgcgaccggcgagactgaaatagggatgcatgggaatgactccgggctgggcaggggagaccagcctacgattcgcctcgctgccggcgcagcattatccaggtacggaatgacgtggcatccgtggctcagcggctaccgcggcgatgcaacagatacaggtagacgatcaggttgagcagcagaacgatggcgccaaggatccactgcaccgccggggtcaggccggcgggatagatcagcggcaacaggtagtgctcgacgaagccgccgctgtagccggcgtccccggcggcccggcgcagacgattctccagcggggtcagcggacagggcaggccgagaaactccaccgtgcagccccaggccaccgccggcaggtgcagccaggccaggcgtggccagcgcaacggcagcaggccgccgaacaggacgaacaggatgaagcccaggtgcagccagaccagggcatcggcggccaggcgatagctcattcggctctccctcgtggcgttggagggataacgccaccgctacaggggccggcggataaccgccttgcggttactcgcccatggtttggccatccataaagaaaaagccggcgaatgccggccatttcaagcgctacgcgtgggcttcggcgctcaggcctgggccagctccgcatcgtgtgcgatcagggcgaccagcgcgttctgctgacggtgggtcagctggcggaaacgctgcagcagctcgcgctcgtgcaggctgagttccgggctgtccaggcgaacaccgagattgtcttgcagcgccccttcctggagcaggctctgctcgagtcgggcgatgatctcggagttcatgctgcggtgatggctgcgagcgacttctgcgatctgctcacgcatgccctcgggcagacgaacgacgaatttgtcagcggtacggctggagtaggtaggagttgcctgtttcagtgggcgcatacattgaacctgtagagtcagggaaaagcggtgccgaggaagcgttcattgttctcgggcctatgaccacgatttccgctagccgttcagtctgttatttcggaaacaacaattagttgacgtcaattgtgcgttgcgtgccggcgttttgccagtaccagctatctgaaatgcgagcgattcagcaaaagcctagttttttactgggggttggatgatggccttctgaccaccggtcgttcaagggattgtcactcgactgtcatcgtcacttcaccgggctgacacagtctccttctatcttggtctacaccagatggcgccgctggcgtcttcgtgcaaccgattggagggagaacgatgagcgcggtgatccgtgtcgacagcctgaacaagacctttgcccgcaagcaggcgcttttcaacctgaggctggagatccaggcgggcgagatggtggcgttgatcggtgcatccggctccggcaaatccacgctcctgcgtcacgtcgccgggctcgcccgctgcgaccgcgacaacggcggcagcatcgacgtgctgggtcgccgcctgcaggcgtccggccgcctgagcggcgaagtgcgtcgcctgcgcgccgacatcggttacatcttccagcagttcaacctggtcaaccgcctcagcgtgctggacaacgtcctgctcggcttcctcggtcgcatgccgcgctggcgcggttcgctggggctgttcagcgccgagcagaagcgccaggccctggaagcgctggcgcgggtcggcctggccgatttcgccgggcagcgcgcctcgaccctttccggtggccagcagcagcgcgtggccatcgcccgcgccctgacccagaaggccgaggtgattctcgccgacgaaccgatcgcctcgctcgacccggagtcggcgcgcaaggtgatggacatcctcgccgacatcaaccgccacgacggcaagaccgtggtggtgaccctgcatcaggtcgactacgcgttgcgctattgcccgcgcgcggtggccctgaagggcggccggatcctcttcgacggcagcagcgagcacctttccgaaggcttcctcaacgaactctacggcgccgaaggggacaccccgctgctgttttccgaccgtgcccggcgcggggcggagagccagccggaactgaccctcgcgcgcgcctgacgtcattcgaaccgcataaaaacccgccaaaccctgcccaggagttctctccatgttgaaacgcttcagccgtgtgctcgcggcttccgccctgctcgccggctcccttgccgggatggcgcacgccgaccagctggtgatcaatttcgggatcatctccaccgagtcgtcgcagaacctcaagagcatctgggaacccttcctcaaggacatgagccagcagaccggctaccaggtgaaggccttcttcgcccccgactacgccgggatcatccagggcatgcgtttcgacaaggtcgacatcgcctggtacggcaacaaggccgccatggaagcggtggatcgcgcccacggcgagatcttcgcccagaccgtcgccgccagtggcgcgccgggctactggagcctgctgatcgccaacaaggacagcaagatcgacagcctcgaggacatgttggcgaacgccaagagcctgaccttcggcaacggcgatccgaactccacgtccggctacctggtgcccggctactacgtgttcgccaagaacaacgtcgacccggtcaaggccttcaagcgcaccctcaattccagccatgaggtcaacgcactggcggtggccaacaagcaggtcgacgtcgccaccttcaataccgagggcatggagcgcctggaattgacccagccggagaaggccaggcagctcaaggtgatctggaagtcgccgctgatcccgggcgacccgctggtgtggcgcaacaacctgagcgacgagcagaagaacaagctgcgcgacttcttcttcaagtacggcgccaacgccgagcagaagaaggtcctcgccgacctgcaatggtcgaagttccagccctccgacgacgaccagttgctgccgatccgccagctcgagctgttcaagcagcgcaccgacgtggcgaacaacgccaacctcggcgccgaagagaaggccgccaagctgaaggccctcgacgaggagctggccaagctggagaaacgcatggccgagcgcgagcagaaaaccgccgccaacgccggctgatccaccccgggcgcggccggcgccgcgccccacccgattcgccaataccgctgtcgagattcccgatatgagcactctgagcaccactgccgcggcggccgccaccggcaagccatcctggggacgcctggtcggctggggcctgttcctcgccatcctcgcctggtcctggaagggcgcggaaatgaacccggccgtgctgttccgcgacgccggcaacatggcgaccttcgccgccgacttcttcccgccggacttcggcaactggaagctctacctcagcgagatgctggtcaccgtgcagatcgccctctggggcacggtgctggcgatcgtctgcgccatcccgctgtcgatcctggcctccgagaacatcgtgccctggtgggtctaccagccggtgcggcgggtgatggatgcctgccgttcgatcaacgagatggtcttcgccatgctcttcgtggtcgccgtcggcctgggcccgttcgccggcgtgctggcgctgttcatcagtaccaccggggtgctcgccaagctcttcgccgaggcggtcgaggcgatcgaccccggtccggtcgaaggcgtccgcgccaccggtgccagcgctctgcaggaggtcatcttcggggtcatcccgcaggtcctgccgctgtggatctcctattcgctgtaccgcttcgagtccaacgtacgttccgccaccgtggtcgggatggtcggcgccggcggcatcggcgtgatcctctgggaggccatccgcggcttccagttcggccagacctgcgccgtgctgatcgtgatcatcgtggtggtgagcctgatcgacgttctgtcacaacgcctgcgcaagctgttcatctgacgacgcgaggagggcgcctggtgcgccctttccaaaccatgcacttgtctagacaaagcgaaccgctgtaccgcgaactggccgaacggctgcgccaggaactgctggcctaccgccccggcgactacctgcccggcgagatccagctggcccagcgcttcgcggtgaaccgccataccctgcgccgggcgctcgacgaactggtgctcgaaggccgcgtgctgcggcgccagggcaagggcacccaggtcctggaggcgccgacgatctacccgatgggcgccgccaacgcctacaccgagtcgctctcggcccagggccaccgggtcgaggcccggctgctggaggcgcgccagcgtccggccggcgccgccgaggccacccacctggggatcggcgagggcgggcgggtgctggaactgaccaccctgcgttacctcgacggacagccagtgagcctgatccgccattgctacgccgtttcccgcagcgagctgctcgccgactaccagggcggttcgctgcgtcgctacctggccgacaaaggcctgccgctgacccgcacctacagcctgatcggtgcgcgcctgcccaatcgcgaggaggcggcgcgcctgctgatgccccgccatgcgccgttgctcaccgtcctcaccctgtcccgcgaccgtaccggccaaccggtggaactggcccagtcgatcagccgcgccgatcgcttccagtaccaggtcgccccctaggagaagcccatgaccgccttgcattccgatcccaccatcgccgcacgacagcgctggatgggcgtgctcgcccgcgcccgtcgcgaggagctggacgcccatgcggacgccctgcgcgatgccgactatcacctgctgcgcgccgccgagaccggcatgaccctggtgcgcggacgcatgggcggcaccggcagcccgttcaacctcggcgagatgaccgtgacccgctgcgtggtgcggctcggtgacggacgcaccggctacagctatgtcgccgggcgcgacaagcgccacgccgaactggccgccctggccgacgcgcacctgcagggcgccgacgcggcggcctggcaggcgcgcctgatcgaaccgctggcccgcacccaggccgagcgccgcgccgcccaggaggcggaaatcgccactaccaaggtggagttcttcaccctggtccgaggagaagattgatgaccagcgcttcgcttcccagcccggcggataccgccgcgctattgcaaccggcgttccaggacccggtcctggatgcccagcggagtttccgcgcggcgctcaaggccctcgccgaaccggggctggtgcgcaacctcgaccgcgcaccggcgctggccgcgttgcaaccggccagctacgcgctgtgcctgagcttcctcgactccgataccccgctgtggctggcgccgggtctcgacagcccgacgttgcgcgccaacctggccttccattgcggctgcccgatcgtcgccgagcgtgagcaggcgctgttcgctttgctcgacgaaggcgagctggacgacctgagcggcttcgacagcggcagcgaccgttatccggaccagtcctgcaccctgctgatccagcttgccggcctcgatggcggcgcctcgctggagtggcgcggaccgggcatcgccgaagtgcgccaggtggcgttgccggtgagcgccgggttctgggcacagcgcgccgcacgcaccgaattccccaggggcctggatgccttcttcgccgccggcgagcgcatcctcggcctgccacgcagtacccgggtcagcgaacccgtcgaggaggtggcctgatgtacgtagccgtcaagggtggcgagaaggccatcgacaacgcccatcgcctgctggcgcgcaagcgccgcggcgataccgcgctgccggagctgtcggtggagcagatccgccagcagatgccgctggccgtgtcgcgggtgatgaccgagggttcgctgtacgacgagcaactggcggcactggcgatcaagcaggcggccggcgacctgatggaagcgatcttccttctccgcgcctaccgcaccacgctgccgcgcttcgccgccagcctgccgctggacaccgccgggatgcgtctgcaacgacgtatctcggcgacctacaaggacctgccgggcgggcaactgctcggtccgaccttcgactatacccatcgcctgctcgacttcagcctgctcgccgagggcgactaccccggccccgaagtggagcggggcgcgtccctggagccttgtccgcgcgtgctcggcctgctcgaccgggaaggcctgatgacgccggagtacgagctgcccggcgcggtgccggatatcacccgcgagccgctcgacttccccaccggccgcgcccagcgcctgcaggccctggcccgcggcgacgagggcttccttctcgccctgggctattcgacccagcgcggctacggccgcaaccatccgttcgccggggagatccgcatcggcgcctgcgaggtctggctggagcccgaggaactcggcttcgcggtgccggtgggcgagatcgaggtcaccgagtgcgagatggtcaaccagttcgtcggttcccgcgaggagctgccgcaattcacccgtggctacggcctggccttcggctacgccgagcgcaaggcgatgggcatggccctggtcgaccgcgccctgcgcgccgaggaatacggcgaggaggtggtgtcgccggcgcagcaggaagagttcgtcctgatgcactgcgacaacgtcgaggccggcggcttcgtctcgcacctgaagctgccgcactacgtcgatttccagtccgagctggagctgattcgcaagctgcgtcgtcccggcgtcgccgaatccgcgcaacccactgaccaggagaagcgcgcatgagcctttccccgcaagccagcgccgcgccggagcagggctacaacttcgcctacctcgacgagcagaccaagcgcatgatccgccgcggcctactcaaggcggtggcgatccccggctaccaggtgcccttcggcggccgcgagatgccgctgccctacggctggggcaccggcggcatgcaggtgaccgcggccatcctcggtgccgacgacgtgctcaaggtgatcgaccagggcgccgacgacaccaccaacgcggtatccatccggcgtttcttcgcccgcaccgccggggtcgccaccaccgaacggaccccggaggcgacggtgatccagacccgccaccggataccggaaaccgccctgagcggcgagcagatcatggtctaccaggtgccgatccccgagccgctgcgcttcatcgagccttccgaggcggagacccggaccatgcatgcgctcgacgactacggggtgatgcacgtgaagctctacgaggacatcgccaccttcggccatatcgccaccagctatgcctacccggttacggtggacgagcgctacgtgatggatccctcgccaattcccaagttcgacaaccccaagctggacatgagcccggcgctgatgctgttcggcgccggtcgcgagaaacgcctgtacgcggtaccgccgttcacccgggtggcgagcctggacttcgaggaccaccccttcgaagtccagcgctgggaagaaagctgcgccttctgcggcagccacgagtcctacctggacgaactgatcgtcgacgaccgtggcggcaagcgcttcgtctgttccgacaccgattactgcacgcagcggcgtgcctgccaggaagaaggggaggacgcgcaatgaacgcggtctgcgaatccatcgatgcgaacctcgacgcgcgcgaccggccgctgctctcggtgcgtggcctgacccgcctgtacgggccggaaaagggctgccaggaggtcgacttcgatctctaccccggcgaggtgctgggcatcgtcggtgagtccggctcgggcaagtcgaccctgctctcgttgctctccgggcgctgtccgccggacgccggcacggtcgcttaccgcgacgacggcgaccgctggctggacctctacgccgccagcgaagccgagcggcgcaccctgctgcgcaccgagtggggcttcgtcgagcagaacccgcgcgacggcctgcgcatgggcgtgtccgccggcgccaacatcggcgaacggctgatggcccagggcgtgcgccactacggtcggctgcgccaggccgggctggactggctggaacaggtggagatcgatccgctgcgcatcgacgacctgccgcgaaccttttccggcggcatgcagcagcgcctgcagatcgcccgcaacctggtctcggcgccacgcctggtgttcatggacgaacccaccggcggcctcgacgtgtcggtgcaggcgcgcctgctcgacctgctgcgcggcctggtgcgcgagctggacctggcggtggtgatcgtcacccacgacctggcggtggcgcgcctgctcgccgaccgcctgatggtcatgcgccgttcgcgggtggtggaagccggtctcaccgaccagattctcgacgacccgcagcatccgtacacgcaattgctggtgtcgtcggtcctgcaaccctgagccgaagcgtcggcgccggtccgcgcgacgggcgcccggagaagtagcgatgaacaacctgatcgaggtccgcgacctcagcaagaccttcaccctgcaccagcaacagggcgtagtgctcaatgtgctgcgcgggctcaacttcaatgtcgccggcggcgaatgcctggtgctccacggacgctccggcgccggcaagagcaccctgctgcgcacgctctacggcaactacctgccggccggcggcagcatccgcctgcgccacgccggcgactggttggaactggtcggcgccgagcctcgcgaggtgctcgccgtgcgtcgccagaccctcggctacgtcagccagttcctgcgggtgatcccgcgggtggcgaccctcgacgtggtcatggagccggccctggcccgtggctggagccgcgacagcgccgaactgcgggcgcgcagcctgctggcccggctgaacatcccggaacgcctctggcaactggcgccgggtaccttttccggcggcgagcagcaacgcgtcaacattgcccgcggcttcatggtcgagtggccgatcctgctgctcgacgagccgaccgcgtccctcgacgaagccaaccgccaggtagtgctggagctgatcggcgaagccaaggccgctggcgccgcgttgatcggcatcttccacgaccgcgccgcccgcgaggcggtggccagccgctacctggacatgagccaggagctttcccgccaggagcaagcccatgtcgtctgaacgcgttctcagcaatgcccgggtagtcagcgccgagcgggtcttcgtcggcagcgtgctgctgcgcgacggcctgatcgccgcggtcgacgaaggccgcagccacctggccggggccgaggacctggggggcgactacctgctgcccggtctggtcgagctgcacaccgacaacctggagaagcacatgaccccgcgtcccggcgtcgactggccatcggcctcggcggtgctggcgcacgacgcgcagatcgtcgccgcgggaatcaccacggtgttcgacgcgctgtccatcggcgacgtcaaccccaagggcaagcgcatgcagcagttgccgaagatgctcgaggccatcggcgaggccgccgccagcggcgacgcgcgcgccgaccatcgcctgcacctgcgttgcgaggtcagccatccgcagacgctggaggtgttccgcgaactggtcgagcatccgctggtgcaactggtctcggtgatggaccacgcccccggccagcgccagttcgccaggctggagaagtaccgtgagtactaccagggcaagtaccacctgagcgatgccgagatggacgccttcatcgtcgagcaggtagccaactccgagcgctacagcgacgccgcccgtgcggccatcgtcgatgtctgccagggacgcggcctgtcggtggccagccatgacgacgcgaccctcgcgcatgtccgcgagtcggccggctacggcatggccatcgccgagttcccgaccaccgtggaggccgccagggccagccacgagcacggcctgcaggtgctgatgggcgcgcccaacgtggtccgcggcggttcccactcgggcaacgtggcggcggcgcaactggcgggaatcggcgtgctggatatcctttccagcgactactatccggccagcctgctgcatgcggccttgctgctcgccggcgagcacagcgagtatgatgcgatccgctacgacctgccgcgcgcggtggcgatggtcagccgtaccccggcgctggccgccgggctgaccgatcgtggcgaaatccgcgtcggcctgcgcgccgatctgctgcaggcgcgggcgctcggcaacaaccagccggtggtgcgtcaggtctggcgcggcgggcagagagtgttctgatgacaggcagactgatttatctgatggggccttccggctcgggcaaggacagcctgttgcaggccgcgcgcgagcccctggcgctgcgcggctgccgtatcgtgcggcgggtgatcacgcgctccgcggaagcggtgggggaggacgcccaggcggtgactccggcgcagttcgacaccctcgagcgggcctcggcgttcgccatgagctggcgcgccaacggcctttgctatggcattccggtgcagatcgacgagtggctggcgcagggctacgacgtgctggtgaacggctcgcgcggctacctggcgcaggcccgccggcgctatccggatctgctcgcggtcctgctcggggtgaaacccgaggtgctgcgccagcgcctgctggcgcgcggccgggaaagccccgaggaaatcgaggcgcgcctggcgcgtaacgccgagttcgccgccggcctggagggcccgctgttccaactggacaactccggtgacctcgacgacacgctacgcaccctcctggcccgtctcggcagcgaccgcgcatgcgcctgaccctgctcggcaccggcgacgcccgccaggtgccggtctacggttgcgattgcccggcctgtcgcaacgcccgcgccgacgccggcctgcgtcgccgtccctgtagcgcgctgctggagtgcgccggccagcgctggctgatcgacagcggcctggtcgatctctgcgagcgcttcccgccccatagcctcgatggcatcctccagacccattaccacgccgaccacgcccagggcctgctgcacctgcgctggggccagggtctggtgatcccggtgcacggcccggccgacccggagggcctcgccgacctctacaagcatccgggcatcctcgatttcagccagcccttcggcgccttcgagcggcgccagtggggcgcgctggcggcgaccgcgttgccgctggtccactcgaagccaaccttcggctacttgctggagggggcttccgaggagggaacgatacggcgcctggcctacctcaccgataccgtcgggctgccggcggacagcgcctcgcgattgctcgcggcgccgctggacctgctggtgctggactgctcgatgccgccgcaggagcggccgccgcgcaaccacaacgacctcacgcgggcactggagtgcatcgaatcgctgcgtccccggcgggccgtgttgactcacgtcgggcatacgctggacgcctggctgctggaccaccccgctgcgttgcccgaaggggtggaactggcgcgcgacggcgtgtgcctgccgctgtgagcgacgctgtagcgcccggcaaagcgctgcgggcgaaatcagtccaggcttggatcgaagcggattcgccgacctaccaccagtgcaaacagcagccatgcgccggaaatgcccagcagtccccaggcgcaccaggcgaggagggtggcctcgggcggcaggctcagcgccaggatcgcgctggcgatcactacgaacagaagaatgacggcggatcgtgacatggtttcactcccggagccctctccgtcgggctcgctgttccttgtgccggctcagtggcgccgaggttccgtggcgcccttgtcgctcagcggaagcttcgctggatattcgtctcctccgcgctctatcagccagagcagcccgtagacgccgaccgaaagggccagggcggtcagcggcaaagccaggatccacatgttctttctccctttccgcccgccagcatcccggggacctgtgcggcggtgtagcgtcgttggatgccggtctcccggcgcttgcttcgtcagaatgtccaggcctgttcgtcggccgcggtcaccagcgccgtgccgcgctcgtcctcgcctacggtgacgatgcgcggggattcgtcgggcgcctggatcaccagttgttgcgcagcgggtgcccactgcggcgttgcgttgctgtccagcactaccggcctttcgccgttgcgttcctgcgtcctgtcctcgtcgcccagtgcgctgttctggaagactacgagagccagcagggaaagaagtccggtgccgaccaggttgcgtgagctgctcatgttcacctccatttcgtagctttgccaggcagatggccaaggtttgatcctgagggtcttgtagcagcggttgtgccaacttttttctataaaaaatccttttaaatcaatgaagtatatatgtgcccgagactctctcgcatgcactttgcacggatgggcattttaccggttgcaaaatgcatgatgatgtcagcccagatgcagcgccaggcttacgccgtggctggtgaaccctagcgcggcatagaagcgctgcgcggtttcccggtcctggtggctggaaagcgccagtttgtagcagccccaactgcgcgcgcgctccacggcccggccgatcagttcgcggcctacgccctggccgcgggcgtggcggtcgaccaccatgtcttcgagaatcgccgagcgggcgaaatcgtgcgccaggtgttcgatcagatgcagggtgcaggtgccgagcaggcgctcgccgcgctcggccaccagggtgacccggtcgccgcgcggtcgttgcagctggatggccagcaacgccgggtccgggcgcggatcggcgctaccgagttgctgtagcagcaacgacaggcgcggcgcgtcgtgctcgctggcgatccgcacgtcgaagctggcgaagggggagtccggtatccgcggctggcgcggggcgtccggcaggtcctgtgcggcgggaatggcaacggtctggttcatgctgcacctccagggttgcggaaaattatgcgcagccttggtggcagtggcatgacaaacgctttctctgccgttaacatgccgcccggacgcggcgcaccgctcgccatgtccggcgtgtcccggtagctcaattggatagagcatccccctcctaaggggaaggttggaggttcgacccctctccgggacgccatttcatgctctgctccagcttccctcgccgcttcgacagtccgcttgccgtcactttctccgatagcttttcttgccgcccggcgtcaggcagtacacccctccgcgcgggcctgtgcagaacgagccgctgccacaggcacagccctgcgtcgtgccttgcagacgctgtacggcgggttgtccggtacgtccgccggcgttgccgaagtaggccgcgcaactgcgcttcgaggcgctgatggagccgtcgttgcagaggaagatatcgccgtcgcaaccggcgataccgcctttctttcccgaacaggggctattggcagccagcgccggaagtgcgcagaccgacaggaggaagagggcagtcgaggcgaagagtccgaatttcattggcgaagcttccgtgcgaatgatggctgcatgctatctcaggcgcgcgccgtgcgctttcgcgagcgcgccgattacatggccttgcccgagccttgacagctccttccgacggggcttataagtggcgccatcaggtcgtgcgcatcagcgtcgatgtcgcgggaccgaacctaacgcatacgcacagagcaaatgggctctcccggggttacccgggagggccttttttcgtcccgaaaaaataacaacaagaggtgatacccatgcgtcacggcgatatttccagcagcaacgacaccgtcggagtggcggtggtcaactacaagatgccgcgcctgcacaccgcggcggaggtcctggacaacgcccggaagatcgccgacatgatcgttggcatgaagcagggcctgcccggcatggacctggtggtgttccccgagtacagcctgcagggcatcatgtacgatccggcggagatgatggaaaccgcggtggcgatccccggcgaggaaaccgagatattctcccgcgcctgccgcaaggccaacgtctggggcgtattctccctcaccggcgaacggcacgaggagcatccgcgcaaggcgccgtacaacaccctggtgctgatcgacaacaacggcgagatcgtccagaagtaccgcaagatcattccctggtgccccatcgagggctggtatcccggtggccagacctacgtcagcgaagggccgaagggcatgaagatcagcctgatcatctgcgacgacggcaactacccggaaatctggcgcgactgcgcgatgaagggcgccgagctgatcgtgcgctgccagggctacatgtatccggccaaggaccagcaggtgatgatggccaaggccatggcctgggccaacaactgctatgtggcggtggccaacgccgccggcttcgacggcgtgtattcctacttcggccactcggcgatcatcggcttcgacggtcgtaccctcggtgagtgcggcgaggaggaaatgggtatccagtacgcccagctgtcgctttcgcagatccgcgatgcgcgcgccaacgatcagtcgcagaaccacctgttcaagatcctccaccgcggctacagcggcttgcaggcgtccggcgatggcgaccggggcctggcggagtgtccgttcgagttctaccgcacctgggtcaccgacgccgagaaggcgcgcgagaatgtcgagcgactgacccgctcgactaccggtgtggcgcaatgcccggtcggccggctgccctacgagggactggagaaggaggcctgacggcagacgccgccagcccggcgtgccgtcgtgcggcacgccgtctccgccatttccccctgtggcagaaggagtttcatccatgccttttctgagcgacatgctcgaccagtcccgccggcagcaggacgaggaacaggccctggcgcgggagaatcttgccgaggcaagtctgctccaggcccacctgagtcaccgcagcgccctgcacagccgtttccgtttcgacccggcggcggtgatggactgcctgcgcgccgaggtgctcggccaggaaccggcgctacaggccgtcgaggacatgctcaaggtggttcgcgcggacatcgccgacccgcgccgtccgctgttcagcgcgctgttcctcggccccaccggggtcggcaagaccgagatcgtgcgcgccctggccagggccctgcacggcgacgccgaggggttctgccgggtggacatgaacaccctgtcccaggagcactatgccgccgccctcaccggtgcgccgccgggctacgtcggggcgaaggagggcaccaccctgttggagcaggacaagctggacggcagtcccgggcgccccggcatcgttctcttcgacgaactggaaaaggccagcccggaagtggtccatgcgttgctcaacgtactcgacaacggcctgctgcgggtcgcttccggcgaacgcacctaccatttccgcaataccctggtgttcatgaccagcaatctctgcgcccatgagatccagcgctacgacgagcgtcgccagcgcctgccctggcgcctgctgccggtcggcggcgagcgccggcggcgggacatcgacgggatggtccgggcccggctgctgaagactttctcgccggagttcgtcaatcgtctcgatagcgtggtcaccttcaactggatcgaacgcgacgtcgtcgcgcgcctggtcgagctggaggtgcagcggctcaaccggcgcctggagaagcatcgctgccgcctggaggcgaccccggaggtgctggcgaagatcgcccgcgccggcttcgaccggcagttcggcgcccgtgcgttgcgccgcagcgtccgtcatcatctcgaggtaccgctggccgagcatctgctcgaccaccaccagccgggcgacgggaactgcacgacctacctggcgagcctggagcacgagcgggttcgcttcgtgcggcgctgagcgacagtcacaggagaggaaacggatgggatcgcaccaggagcggccgctgatcggcctgctgttctccgaaaccggcgtcaccgccgatatcgagcgctcgcagcgctatggcgcattgcttgcggtcgagcaactgaaccgcgagggcggcgtcggcggtcgcccgatcgaaacgctgtcccaggaccctggcggcgacccggaccgctatcggctgtgcgccgaggacttcattcgcaaccggggggtacggttcctcgtgggctgctacatgtcgcacacgcgcaaggcggtgatgccggtggtcgagcgcgccgacgcgctgctctgctacccgaccccctacgagggcttcgagtattcgccgaacatcgtctacggcggtccggcgccgaaccagaacagtgcgccgctggcggcgtacctgattcgccactacggcgagcgggtggtgttcatcggctcggactacatctatccgcgggaaagcaaccatgtgatgcgccacctgtaccgccagcacggcggcacggtgctcgaggaaatctacattccgctgtatccctccgacgacgacgtgcagcgcgccgtcgagcgcatctaccaggcgcgcgccgacgtggtcttctccaccgtggtgggcaccggcaccgccgagctgtatcgcgccatcgcccgtcgctacggcgatggcaggcggccgccgatcgccagcctgaccaccagcgaggcggaggtggcgaagatggagagcgacgtggcagaggggcaggtggtggtcgcgccttacttctccagcatcgatacgcccgccagccgagccttcgtccaggcctgccatggtttcttcccggagaacgcgaccatcaccgcctgggccgaggcggcctactggcagaccttgttgctcggccgcgccgcgcaggccgcaggcagctggcgggtggaagacgtgcagcggcacctgtacgacatcgacatcgacgcgccccaggggccggtccgggtggagcgccagaacaaccacagccgcctgtcttcgcgcatcgcggaaatcgatgcgcgcggcgtgttccaggtccgctggcagtcgcccgaaccgattcgccccgatccttatgtcgtcgtgcataacctcgacgactggtccgccagcatgggcgggggagcgctcccatgagcgccaactcgctgctcggcagcctgcgcgagttgcaggtgctggtactcaacccgccgggagaggtcagcgacgccctggtcttgcaactgatccgcatcggttgttcggtgcgccagtgctggccgccgccggaagctttcgacgtgccggtggacgtggtcttcaccagcattttccagaatcgccaccacgacgagatcgctgcgctgctcgccgccggaactccgcgcactaccctggtggcgctggtggagtacgaaagccccgcggtgctctcgcagatcatcgagctggagtgccacggcgtgatcacccagccgctcgacgcccaccgggtgctgcctgtgctggtatcggcgcggcgcatcagcgaggaaatggcgaagctgaagcagaagaccgagcagctccaggaacgcatcgccggccaggcccggatcaaccaggccaaggcgttgctgatgcagcgccatggctggaacgagcgcgaggcgcaccagtacctgtcgcgggaagcgatgaagcggcgcgagccgatcctgaagatcgctcaggagttgctgggaaacgagccgtccgcctgagcgatccgggccgaccagaacaataacaagaggggtatcgtcatgatgctgggactggttctgctgtacgttggcgcggtgctgtttctcaatgccgtctggttgctgggcaagatcagcggtcgggaggtggcggtgatcaacttcctggtcggcgtgctgagcgcctgcgtcgcgttctacctgatcttttccgcagcagccgggcagggctcgctgaaggccggagcgctaaccctgctattcgcttttacctatctgtgggtggccgccaaccagttcctcgaggtggacggcaagggcctcggctggttctgcctgttcgtcagcctcaccgcctgcaccgtggcgatcgagtcgttcgccggcgccagtggtccgttcggcctgtggaacgcggtcaactggacagtctgggcgttgctctggttctgtttcttcctgctactggggctgtcccgcagcatccagaagccggtggcctacctgaccctggccagcgccatattcaccgcctggttgcccggcctgctgctgctcgggcaggtgctcaaggcatagcaggaagtcggaaagggatggcggcttgccgccatcccgtcccttccgaactcctagccgagcggccagttgatcaccacgacggcgtcgttgtagtcgttgtcggtgccgtcttcagagccgaccagggcgaagttcagctcgttggtcaggattacctgtgccgagaccagatccgaggggcggccgttgacgctgacctggacctgtaccttgccactgctgccggagttgagcacctgggtgccgatgacggcgttattggtgctttgcccgctgaaggtcgcggccgtctcgttgttgaccagcacgttcaccgtctgggttccggacgagttggcgaaggcggtgacgccgaaccgggtgttggcgggaagggtgaacactccttgtgttgccatggtgtatctccactgaatacctggcctgccttttcaggcagccgtctggcgcgcggtatggcgtgtcgggagaaatccgcagtccttggcggcaggcgatgcgcaggcaggaaggacgcatcgttcagccaatctacgccgtcgaccgggcgcgaccactgctagagttcgcaggagggctacaggggtgtcctggcactggcgatgcatggcccggtgccggactgcggcagcggcctgccgtgccggctcgttcgattgttacgctttctgtaacgatctattgccgatgccggcaggccaggggcgattgtctcgaaatatactgcgtcacctggtcgccgcagcggcgacggctacccactggccgtcgtccgggtcgccggttccatcccggccgcgccaacccccgcattcaggccccgctgcggcgactgcattcccgctggattcgaggctcgtaccctatgactcccgatcaacgatttgcccgttgggttcaagtcgctatcgcggtattcgtgttgctgttcgtctacttcctggtcgccgacctgtggatgccgctcaccccgcaggcccagttgacccggccggtggtgcgcgtcgcgccgcgtgtctgcggtcaggtcgccgaggtgctggtgtccaacaacggccacgtgcagcccggcgaagtattgttccgcctcgatcccgagcctttccgactggccgtgcgccaggccgaactggcactggaggaagccgagcgcaccaaccgcgagctggatgccgccatcgcctcggccaaggccgacctcctggccgcgcgcagcagcgccggcgagctggacagcgaggcgcgccgcaccgcccaactggtgcagcgccaccatgtgtcgcagcagatgcacgagcaggtcagcgccgaggcccaggccgcccgtgcccgggtcgccgcggcccaggcgcggatcggcgagctgaccgcgcgacgcggcacggccggcgaggacaacctgcgcctgcgccaggcgcgcaatgccctggcccaggctcgtctgcaactgcaatacagcagcgtccgggccgaccgcgccgggaccctgagcaacctgcaactgaccccgggcacctacgttccggccggaacgccggtggcggcgctggtggacgaccgtatcgacatcgtcgccgacttccgcgagaaatcgctgcgctacgtgcgccctggcgaccgtgcggcggtggtgttcgacgcgcgtcccggcgaagtgttcggcgcgcgggtggcggccatcgacgccggggtcaaggagggccagctggacgccaacggcgacctcgccgcgccggtcacctccgaccgctgggtccgcgacgcccagcgccagcgcctgcacgtggtgctcgacgaacttcccgaaggcctgctgcccaccggtgccaaggccaccgtgcagctctatcccggcgacggcctgagccatctgctcggtcgcgcgcagatcgtcgccatcagcctgctgcactacgtctactgacgccatgccggccaagctcgcgatgtccgccaacgacctgcgtcagtgcctgcgcatcgccggcggcggcaccctggggttcttcgtctgcaagctgatgaactgggactacggctcgttcttcggcgtctacccgatgctgctgctcggcctgacgccggtgatcaacctgcacatcgtccgccagttcctcgccaactcggtggtgatcagcgtcgaggtactggtgctgtacgggttgttcggcgaccggccgctgctgatgacgcctatcgtcttcggcctcttcgtctaccgcttcgccctgatggcgcgcggcccgctgttcttcttcggcgcactgagttcggtgttcctctcgatgctgctgcactttgccagctatccggacgtcgatctgttcgacatgctcgccagcaacatggtcgccacctggctgacggtggccatcgccgtgctgatgttctacctgttccccgacgtcgaaccgcggtcgccgcgccaggcgccggccaaggacgcccccagccggcgccacgagacgctgctcggggccacggtggcgaccctgtccttcgtggtcttccagaccttcgacctgaaggactcgctgtcggcgcagatcgcctcgatcctggtgttgtttcccatgcactggaagggcgtgcacttcgccgggcgcatccgcgccctcggtacgctgctcggctgtgcgctggcggtgggcttgcaggtgctgctctacgatcactacgacatcctgcccttcgtcgctctgttgctgtggatctcggcgatgttctgcgcgcgcatccacatgctggagaacggcgtaccggggatcggtttcggcgcgctgaccaccctggcgatcgtcctcggccagtacctgacgccaacccacgacatgatgtacagcgtgctctaccgatttacctcggtgtgcttcgcggtgctgatcacactgatgacggtgctggtgatccacctgttcctcaaccgcttcgccgccacccggcactacagccactgaggcctcaggcgcgccggcccggccagttgaccagcgcgacgccgagcatcaccagcagcatgccgccgatcgccgccggcgccaggcgctcgtcgaacagcagccaggaggccagcgcggtcactggcggcaccaggtagaacaggctcgccaccttcgacgcggcgccatgccggatcagcgtgtagagcaggccgacggcgccgaacgagagtcccagcaccagccagccgagggtcagcacgaacggcgtgctccactgcacctcgcggctttcgaaaagcagggcggcgaggccgagcagggcgccgctggccaggtactggacgacgccgccggtgcgcaggtccatgccgccgcagaagcgcttctggtacagcgtgccgcaggtgatcgccgccagtgccaccagcaccgcggcccaggccaggccgtcggcgccaccgtggatgcggccgagtaccaccagggctacgccagccaggccgagcgccagtcccagccattgccggcggctgacctgctcgccgagccagatgccggccagggccgcggtagccagcggttgcaggccgaccaacagggaggtcaggccggccgacatgccgtgctcgatggcgaggaacaccccgcccaggtacaggccatggaccagcaggccggcgaccgcgacatgcccggccagccgtgccgagcccggccagggtgcaccgctgagcagggcgaaggcggccagcagggcggccgcgaggagcaggcggatggccaggaaggtgaagggttcggcgtacggcaggccgaacttggcgccgaggaatccagtgctccagagcagcacgaagagcagcggcatgccgctgccgagccaggcgggtgtgcgcatgcaaggtcctcgtcgggaggtggcgggacggtcgtggcgccccgtgcgtgtcggtgtcagtccagcagcgagcggcctcgctccaggtaggcgcgcatttccgtctcgggcaccatgccgccgccggtggcccagaccaggtgggtagcattggccaggcgcgccgaggtcagccccatgcgttcgcgatagccctgcggctcacgggtgacccgggcgatgcccggcgcgccggccagggccgagggttccaggcggatgccctggctgcgctcgagcaaggcgagcaggcggaacaactcgtcgtcgtccaccgtgtagtagccgtcgagcaggcgctgcatggcgcggccgacgaagcccgacggacgccccaccgccaggccatcggcggcggtgcggttgtcgatgccgaagtcctgcaccgaaacctgctcgtggcggccggtatagacgccgaggaacatgcagggcgaatgggtcggctcggcgaacaggcagtgcaccgcgtcgccgaacgccagcttgaggccgaaggccaccccgccgggaccgccgccgaccccgcagggcagatggacgaacagcgggtgctcgctgtcgacgcggatgccggcggcgtccaactggccgcgcagtcgctcggcggcgacggcgtagccgaggaacaggtcgcgggagttttcgtcgtcgacgaaatgggtgtagggatcgccggccgcttcgcggcggccctgttccaccgcgacactgtagtcggaggcgtactccaccaccgtcacgccgtgggcgcgcagcttgtccttcttccactggcgggcgtcggcggacatgtgcacgctggcctggaagcccagcgcggcgccgatgatgccgatggaaaggcccaggttgccggtggagcccaccgctatccggtggcgggcgaagaatgcccggcaatccgcctcggccagccgcgagtagtcgtcgtcgaggccgaccaggccgtgctccagggccaggcgctcggcatgggcgagcacttcatagatgccgccgcgggccttgatcgagccggagatcggcaggtggctatcgcgtttcagccagagccggccgggcagttcggcggcgtaatgctggcgcagggcatcgtggaaggtggcgacctcgaccaggtcggactcgatgatgccgccgctggcggcggtttccggaaacagccgggcgatcagcggggcgaagcgctgcaggcgggcgctggcgtcggccacgtcggcggcgccgaggccgacgtcggccagggcttcggcgctcggcgcgatggccgggttgaaccactcgctcgggcgcagggcgatgaggtcggccaggcgcgggaattcggcgagccagtcggccttggatgttccgagaatcaacggcagtactcctgtggcgggtagggcggcgaaggcacagaggatatacgcctggccggcgtttttcctcgtacccggcaggcaaggcagaacgcctctgcggcgaaaggctttgcacacgcgagaatgtgccgcatgcttgatatcttgaacaagcgatgcgtattttgtacgcggccgccgcccggtgcggcatccgcgataccaacaaggataagaagtcatgactatcgaaggccaaggctcactcgccgaacggctggctggagttgaagaaatcgaatgcgtcacccccgacctcaacggggtgccgcgcggcaaggtgatgaccggcgagggcttcctcagcggccggcgcctgcagctcgcccgtggcgtgctgctgcaatgcatcatgggcggctacccgccggcgcgcttctatggcagcgacgatggcgacctggcgctggtcgccgagccgacccaggtccatcgcctgccctggagcaacactccgcgcgccttcgccatctgcgatgcgcaggaactggatggcacgccgtccgggctgtccacccgcggcctgctcaagcaggtggtggcgcgctacgccgcccacggctggcaaccggtggtggccaccgaactggagttcttcgtcttcgccccgaacaccgatcccaacgagccgttccaggccccgctggggccggatggccggcgcgagctgggctattcggccttcagcgtgtcttccaacaacggcctgcggccgttcttcgaggatgtctaccgctgcatggatgcgctgggcctggtgcgcgacaccttcatgcacgagatgggcaccagccagttcgagatcaacttcctgcatggcgacccggtcctgctggccgaccagaccttcctgttcaagcacctgctcaaggaggtcgcgctcaagcacggcctgatcgtggtgtgcatggccaagccgctggcgaagacgccgggcagctcgatgcacatccaccagagcatcgtcgaactggacggtgggcgaaacatcttcagcgaagccgatggcgagccttccgccgcgttccgccacttcatcggcggccagcaggcctgcctggcggacttcacgcccttcttcgcgccgcatgtgaactccttccagcgcctctgccatccctacgcttcgccgaacaacgcctgctggtcccacgacaaccgcgccgccggcctgcgcatcccggccagcggagcctccgcgcggcgcgtcgagaatcgcctgccgggcgccgacgccaacccttacctggccatcgccgccagcctggccgccggtctctacggcctggagcacgaactggagccgagcccggcgatccagggtgagttcgaggtaccggaggagttgaccctgccttgcaccatgtacgacgccctgcggcgcctgaaaggcagcgcgctggcgcgcgaactgttcggcagcgagttcgtcgaaggctacgtggcgaccaagagcatggagctgaccagcttcttcgacgagatcagcccctgggaacgtcgcgtcctggcagcccaggcctgatccaccgtggtactttcctagccctgtgtcaccccctgccgcctcgcggcggcagggtcgtggtgtcgggtgccggcttcggcatcccgcgtcctgtcccggggcctccccgggactccaacgctgtgcgagccgggcagtccgcgagcggcgccggctcccttgtacgggaccggaggtccgatgcggcggattttcttctcttttcgcgctctctatttcgctaccctgctgatgctcaccggctccggcctgctcagcacctacctggcgctgcgcctggcggcggacaaggtcgacggcctgtgggtcggcgcgctgatggcagccaactacttcggcctggtgctgggcggcaaggtcggtcaccggctgatcgcccgggtcggccacatccgcgcctacgtcgcctgcgccggggtggtcaccgccgcggtcctcggccatggcctgctgccctggctgccggcctggatcgccttgcgcatggtgatgggcctgggcctgatgtgccagtacatggtgatcgagagctggctcaacgagcaggccgatgccagccagcgcggcgcggtgttcggcggctacatggcggcttcctacctgggcctggtgctcggccagatgatcctggtggcgcatccgcaactggggccggagttgctgatgctggtggccttctgcttcgccctgtgcctggtgccgctggccctgacccacaagatccaccccgcagcgctgcgcccggcgccgctcgaaccacgtttcttcatccgccgggtgccgcagtcgctgaccaccgtattggtctcggggctggtggtcggctccttctatggcctggcgccgctgtatgccaaccagttggggttgcccaacgagcaggtcggcctgtacatgggcgcctgcatcttcgccgggctgctggtgcagtggccgctcggctggctgtccgaccgtcgcgaccgcgcctggctgatccgcgcctgcgccatcctgctgtgcctgttcgccttgccgctggcattgttgcaacagatgccgctggcgttgctgctggccctgggaatcgccgcgagcatgttgcagttcaccctctatccgctggcagtggccttttccaacgaccatgtggagaccgagcgacgggtttcgctgaccgccatgctgctggtgaccttcggcgtcggcgcctgcatcggaccgctggcggccggcgcgctgatgcggctgtttggcgctaacatgctatatgcgttcgtcagcgcctgcgcgctgatcctggtctggcgggtccatccggagaaggtcagcggcctgcaccgggtcgacgacgcgccgctgcaccacgtgccgaccccggacaacatgaccagctccccgctggtcgcggcgctcgatccgcgggtagacgaacaggcggtgcaggagcagatggtcgatggcgagcccgacgcgccgcaggccgacggtgcgacgcagaactgaactccgctcgccgcgggagccgataggcaggagaggttgcgatgagtccgacgctttcccttcacctgatggtgcgcaacctgccgcccgggcagcggcggccgaagatcgcccaggccatcggcgaggagagcgcgggacgcttgcagcgggtattgctggaacgcgccctgcgcctgcccgatcgcggtttcagcgcccgcatcctctggttcgacgacgatctggacagcgatctgcaggcgctggcggtggcattgggctggagcctgatgagccagccggccggcgaccccggcgagcgcatgcggcgtatcgcggcgctggggttggcggaaagcgaggcggtactgctgattcgccacgactgcccggtgctggacggcgactacctggaagcggcctgcaccgccctgggccgccaccaggcggtgctggggccggtggagcggggcggctacgcgctgctcggcctgacccgggtcgacccgctgttgttcgagtcgatgccctggggcggagaccgcctgctggcgctcacctgcgagcgtctccggcaactgggctgggagcatcacctgttgccggcgctctgggacgtcgaccgtcccgaggacctgccgcgcctggcggcgctggggctggtcctgtgaaactcagaacagttcgtctttctcgaagcgccgcgcttcgcgctgtaactggtagacgaagcgatccacctgacgctgggcgaggccgctcatctcgctgaagcggacgccggcgaaggtcgcgtcgagcttttcgtcgaagcgcacgtgacgcagttcgatcgcgctactgatcgcgccctgtggcagctgggcgctgaagtcttcgtagatctcgccgggatgcaggcgttcggcgacattgccggcgaagcgcagcttggcgccggtggcggagatatccagcagttgtccgctcagcggcgcgcggagtttctccccggcgatttccgcggcgatcggctggctctgcttgatgctggcgcggtaggcgttgcggcgctggtggtagagcacttcggcgggaagggcggcccagtagcagggaacgccgtcgtgttcgccgaactgcaccgggcgctcgcattcccaggcgatacgcacgccttcgtggaaggcttcgacgcgaaacgcctcgccattctgcaggaaacgttcgccggtgttggggatgagttcgtccagcgcgaccatcccgcggtcgcggtcgatgtccaccaggaagctctggaagcgctggttgcgatcggcaaaggtgatcagcagggagtcgcggctatcctgcagcaggcgcaggttggcctggatttccacgggggccttgagcaccttcgggggttgcggccccgcttcttcgacgaacgggttgggcaccttcaatgctctcctggggcacgaatgcctcaatgatagcactgtgccttgatacgtgtgctggtcgggttcaggcctggctgagcgggcgttgccggctgctcgaggcggtgccgccgcggctgtcgtacaggctcggggcgtcctggccgcggaggatgttcagcaggctgccggtggaagcctggttggcgcggatgatccgcccgttgcgcaggttggcctgctggcaacgctccagcagttcgcccagttcgtcgccgcgcgccagcagctcggcgccatccgcgcgctcgcgggcgtagcgggcaaggccttcgcggtcgagggaaacgccggcttcgcggaggatttccgcgcgggcccggccatttcgctccagttgctgcatcagtggctgcttggccccgagaagctgttgcaggaccggcagctcgcgccgttccagggcctggaattcttcgtcgaccaactgcaggagttggctggcgtggccgatatcctcggcgaacagatcgagcagggtaggggagtcaggcatctcgggctcgggagttcattcggcgtccaatgtcctccagcgcgtccttcgaggtcagcgctgggattcgaagtcgagcagcttgctggcaacacgctcgctgtcgacctgataagtgccatcggcgatcgcttgcttgatccgggcaaccttatcgttgtcgaccaccggcagggtctgcagctggtccgtgactttctgcatgttctgggcggtttcgctgatctgcaccgactcgccgctcttcggagcggaagtcgcggcctggcctgccttgtcggcgccagtggcgtcgggacgccccgcggcggtgctgccggtacggccggtggtggctggcgtgctgccgggattcagccggttgaagtcgatgaccatggttgtaaacctcgaaggtattggacgcttgcctagcttttcggcgaaggcttgaaaaactttaggacttattttcgtgcgtcgtttcccagtttagagaaacccgccggggtagcgccagcgctaccggccacggctttccctctacatattcacctcgaccgtgccgggttctatcacgcgggccttgattatccgctgcgagcgcaggttgcgcacgcggatctgctggcccggggcgccatcggacagcgcctcgccgggcatcttgacgttgatggtggcggtgcgtgcgaggatcaccacctggtcgcccttgcgcacggcctcggcctgctcgaggaagaccggcgccagcacctggtcgttgaccaccggtcggcgcagcttctgcccgacgacgcgggccggatcggtcaggtagccctgggtcagcaggccgacgtcgcgctcgaccagggcgatgtcggcatcctccagcacgtgcgcgcgcttgagtggctgcaccgcgaccactacctggcggaacagtttcacctgcgccggcatgaagatggtccagggcgcactgccttcgcaactgatgcgcacggtgaccctgccgatcggttgtgccggactttcctggctgagcgtcaagtccctgtcgcattcggccaggcgcaagcgcgggtcgacgcgattgacctgaatctggtagcgcccgtcgagtccgctattctgcagatattcttctaccttgaattcaagaaacccctgggtggagccgataagtacctcgggagcggtaaaaccctgggcctggctgttgttagccgcgcacaggtagccgagcccgagcaaaacgggtaaaaaccgtagagaagtatggctacatgccattattcgtcgaaaaactgtcgttgcctgtttcatgcaacgggttaagcaatggtcgtgccggagtccggcacgaccgtctgaggggagcgccaatggccggtgttttggattcagtcaaccagcgtacgcagttggtcggacagaaccgtctggagctgcttctgttccgcctggacggcaaccagctctacggcatcaacgtgttcaaggtgaaagaggtgttgcagtgcccgcgcctgacggtgatgcccaagtccagcccggtggtgcgcggggtggcgaacatccgcggaggcaccattccgatcctcgacctggcgctggccaccggccgccgcgggttgcaggacctgaccaacagcttcgcgatcatcaccgagtacaacaccaaggtgcagggcttcctggtgcgctcggtggagcgcatcgtcaacatgaactgggaagagatccatccgccacccaagggcgccggccgcgagcattacctgaccgcggtgacccgggtggacaagcagttggtggaaatcatcgacgtggaaaaagtgctcgcggaggtcgcaccgacgtccgaggaagtgtcccacggagtggtggacgccgagacccagagccgcgcggtgaccaagcgggtgctggtggtggacgattcgtcggtggcgcgcaagcaggtaatccgttgcctggaggcggtcggcgtggaaatgaccgcgctcaacgacgggcgccaggccctggagtacctgcagaacatgctctccgagggacggcgtccggaagacgagctgctgatgctgatctccgacatcgaaatgccggaaatggacggttataccctgacggcggaaatccgtagcgatccccgcctgcagaaactgcacattctcttgcatacttcgttgtccggggtcttcaaccaggcgatggtgaagaaggtcggtgcggacgacttcctcgccaagttccgtccggacgatctggcggcgcgggtggtggagcggatcaaggcggtggacgcgggctgagcgatcggccctcgacaacaatgtgaatacgggcgaccggctgcgttccggtcgcccagggcgaagaggcttatgcgtgtcggcagctaatgcggatttcgagttgttcagggtcttcctcgagaagacctgcggcattgtgctgggcagcaacaagcagtacctggtctcgagccggctgaacaagctgatggagcagcagggcatcaagagcctgggagagctggtgcagcgcatccagacccagcgcggcggcctgcgcgagatggtggtggacgcgatgaccaccaacgagaccctgtggtttcgcgatacctacccgttcgaggtgctcaagcagcgggttcttcccgaactgatcaaggccaacggcgggcagcgcctgcggatctggtcggcggcctgttcgtcaggccaggagccatactcgctgtcgatggccatcgacgagttcgagaagaccaacctggggcagttgaaggcgggcgtgcagatcgtcgccaccgacctgtcggggtcgatgctcaccgccgccaaggccggcgaatacgacaccctggcgatgggccgcggtctgtccccggagcgtctgcaacgctatttcgacgccaagggaccggggcgctgggcggtcaagccggcgatccgcagccgcgtcgagttccgtgccctgaacctgctggacagctacgccagcctcggcaagttcgacatggtgttctgccgcaacgtgctgatctatttctccgccgaggtgaagcgcgacatcctgctgcgcatccatggcacgctcaagcctggcggctacctgttcctcggcgcctccgaggcgttgaacaacctgcccgaccactaccagatggtgcagtgcagcccgggcatcatctaccgggccaagtagcgcaaggaagcggacccgcgccaggttgcgccgggggtgacctggcagcctggcgcgggtccgcttgggacgggcaggtgggacgagactttcgcccactgcccaggctccgagcgccacgcgcggcggcgccgtcgcagcccgctcggcacaggacggctggctcggagcggggcagtttaggactgcgcgatctagttgtattgacagatatttctgatagtcaggtgatctggcaagttgccgctttgccggggaactgcttacatgattcaagccttccctcgatccgccacgcctaccaggagacttccatggccatcactgcgctgccctcggccgatgggcaagagttgaccatccagatccaggggcgcttcgacttcggggcccatcaggatttccgcgacgcctacgagcgcgtcgcgatcactccgcgacgctatgtcgtcgacctgcgcaacgccacctacctggacagctcggccctcggcatgctcctgctgctgcgcgaccacgccggcggcgagaacgcgcagatcagcctggcgaactgcagcccggaagtgcgcaagatcctcgccatctccaacttcgagcagttgttcaagatcagctgagatgaatcccccggcggcgcggatcgagagcctgacgattctcatcgccgaggacaacgcggccgaccgcctgctgctgtcgaccatcgtcagccgccaggggcatcgcgtgctgaccgccggcaacggcctggaggcggtggcgctgttcgagaccgagcggccgcaactggtcctgatggacgtgatgatgccggtgatggatggcttcgaggctgcccggcggatcaagcagcaggccggcgaggagttggtgccgatcatcttcctcacctccctcagcgaaaccgaggcgctggtgcagagcctggaggcgggcggcgacgacttcctctccaagccgtacaaccgggtgatcctcgaagccaagatcaacgccatgggacgcctgcacctgctgcaacgaacggtgctggagcagcgcgacctgatcgtccggcacaacgagcacctgctcaacgaacagcgggtggccaaggcggtgttcgacaaggtggcccattccggctgcctgaacgccagcaacgtgcgctacctgcaatcgcccctcgcgctgttcaacggcgacctgctgctggccgcctacaagccgtccggcggcatgcacgtgctgctcggcgacttcaccggccacggcctgccggcggcgatcggcgcgatgccgctggccgaggtgttctacgggatgaccgccaagggctatccgatggccgacatcctccgcgagatgaacgccaagctgaagcgcatcctgccggtcggcgtgttctgctgcgccaccttgctcaacctgagcttccagcgcgaactggtggaggtctggaacggcggtttgccggacggctacctgctgcgcgccgccagcggcgagcgggtcgccctggtgtcccgccacctgccgctgggaatcctcgaaccggcggcgttcagcgaccgttgcgaaacctatccgctggatatcgaagatcggatattcctgttttccgacggggtcctcgaggccagcaacaaggctggcgagatgttcggcgaggcgcggctgctccagctgttcgagcgcaatcgccagccgtccgcgctgttcgacgagatccagcgcagcctggcgcagttccgcggcgcggtgcaggacgacgtgagcatgctcgaagtgcggctgcagccggatagcggcctgcaatgcccgccgctggcgttttccgatagcggcgtgagcagtccgctggactggtcggtgagcttcgaattccgcgccgaaaccctcaagcatttcaacccgctgccccatgtgctgcaactgctgctcgaggtccacgacctgcgcgcgcgcggcggcgcgctgtatacggtgctcgccgaactctattcgaacgccctggaacatggcgtcatcggcctcgattcgacgatgaagagcgacgcggcgggattcgcccgctattaccaggagcgggtcagccgcctgcaggccttgcgcgacggctacgtgcgactgcacctggacctggcgccgcatggcgcgggggggcgtctgctggtgcgggtcgaggacagcggcgaaggtttcgacgtggagcgcgcgctgaatgccgtggagcgccaggaacgcctctgcggcaggggtttgcgcctgatccgcgaattgtccgatcgttgccagtggtcggccgacggaaaggtggtgtccgtggagtttttctggtcgcctcaggcataatcgcgctttcgtcgcggtgctcctaatgggtagggcatcggaagtcgacttcagggagcgatcgaatgtccgcgccgcatctcgatgatcgtgttctggcttcgctgcaggaggtcatggaggacgaatatccggtcctgctggataccttcgtgctcgactccgaggagcgcctgcgcagcctgcatgccgcccttcaggccggcgatgcccaggctttgcggcataccgcacacagcttcaagggaggcagcagcaacatgggggcggtactcctcgccggctactgcaaggagctggaagaaagcgccaggcgcggcgacctgcaacgggcgccggcgctgatcgaacagatggagcgcgaattcgccatcgtccgcatccttttcaaacaggaacgtcagcgctatcgctgaggttttcgtcctttccggcgacaaggtaccggcccgatcgagcctccctggcgtataatgcgccgctcgatttggagtccttcatgcgcgagcaagccctacgcatcctcaaagacgttttcggttacgacgccttccgtggcaaccaggcacggatcatcgagcgggtagccgagggtggcgatgcgctggtactgatgcccaccggcggtggcaagtccctgtgtttccaggtcccggcgctgctgcgcgaaggcctgacggtggtggtgtcgccgctgatcgcgctgatggaggaccaggtcgccaccctggacgaactcggcgtgccggcggtggcgctgaactccaccctcaaccccgagcagcagcgggacatcgccgagcgcctgcagcgtggcgagatcaagctgctctacctggcaccggagcggttggtccagccgcgcatgctggccttccttcaacgactgccggtcggcctgttcgccatcgacgaagcgcactgcgtgtcgcaatggggccatgacttccgtcccgaatacctgcagctcggccagcttgccgagctgttcccgcaggtgccgcggatcgccctgaccgccaccgcggacatgcgtacccgcgaggagatgatccagcgcctgcacctgcagaacgccgagcagttcctctccagcttcgaccggccgaacatcttctaccgcatcgtgcccaaggagcagccgcgcaagcagttgctcggcttcctctccgagcggcgcggcgatgccggcatcgtctactgcctgtcgcggaagaaggtcgaggaggtcgcggaattcctcggcaaccagggcttccccgcgctgccgtatcacgccggactgtccaacgaactgcgtgcccaccaccagaagcgcttcctcaacgaggaaggcttgatcatggtggcgaccatcgccttcggcatgggcatcgacaagcccaacgtgcgtttcgtcgcccacctcgacctgcccaagagcctcgaggcctattaccaggaaaccggccgcgccggccgcgatggcctgccggccgacgcctggatggcctacggcctgcaggacgtcctgctgctgcggcagatgatgcagagttccgagggcgacgagcggcacaagcgcgtcgagcggcacaagctggaagccatgctggcgctctgcgaggaaacccgttgccggcgccaggcgctgctggcctatttcgacgaggagatgccgcagccctgcgggcattgcgacaactgcgtggacggcgtggaaacctgggatgccaccgaatccgcgcgccaggcgctgtcggcgatctaccgcagcggccagcgctacggcgtcggccatctggtggatatcctgctcggccgcgagaccgagaagatccgcagtctcggccaccagcacctggcggtgttcgggatcggcaaggggcgtggcgaagacgagtggcggaccctgttccgtcagttggtcgcgcgcggcctggccgacgtcgacctggacggcttcggcggcctgcgcctgaccgaggcctgtcgtccgctgctgcggggcgaggtgcggctggagctgcgccgcgacctcaaaccccagcgcgccaagggctcctccagcggcggcgccagcgccgccagccaattggtgcgcagcgaagagcgggaaatgtgggaggccctgcgcgcgctgcggcgcaagctggccgaagagcattcggtgccgccctatgtgatcttccccgacgcgaccctgctggaaatgctccgcagccagccgcgctcgctatccgacatggcccaggtcagcggggtcggcgcgcgcaagctggagcgctacggccaggccttcctcgatgtcctcaccgactcgccggcggcgcccgccgcgccgccgcaggacctgcgccacgaattggccagcctggcctgtgcggggatgaccccggcgcagatagcccgccagctcaattgcagcgagaagaacgtctacgcgatgctcgccgaggccatcgccggtcagcaggtgagcctggagcaggcgctggatctgcccgaggaactcctcggcgaaatccaggacgccttcctcgaggaagacggcgaactgccgccggtggcggcgctggaggagcgtttcggcaagcgggtgccgagtggcgtgctgcactgcgtacgcgccgccctgcaggtggaactggagtcgtgatatggccatttgccggtattttctgacgccaatcttgtgacgtccttcgcaagcgtctactgtgacgccaagccctccaagagaagaggtgtgcgtgacacagaaggaccggttggacgactcccgttccaacctctatgccgaccaattgaaccgcggtttccgcggtctgcgtttccttcccgaactggagcgtgactaccggcgctacatgctggaggacagcttcgcgctgaaacgcatcgccctcagcgtcggcatgctcgtctggctggcgttcatcggcatcgacctgctgatcctcgctggtcccccgctgtggggcgtactggcggtgcgccttggcgtgctggtcctgctactggtctgcggctgcctgatcatgctgcgccggcacatccagctgatggtgccgctgagcatcgcctgcgtcctcgcccttggcgtcggtgcggcggcagtggtcggcctggcgcatcgggcggatcccggctatccctacgaaggcctgctgctggtcagtttcgccgcctatttcctcgccggcctgcggttgtcgcaggcattgagctgtgcgttggtcgtgctgctcgcctacctgggtttcgagtggtgggcgggtacccaggagccgctgggcaacaacctgctgttcctgctgttcggtaacctgatcggcgcggtcggctgctacctgctggagttcaagtcgcgcgagcatttcctcatcagccgcctgttgcgggtgatggccgaccacgacagcctgaccggcctgcacaaccggcgcagcttcaaccagcacctcgaccgcctctggcgccaggcccagcgcgaacagaagaccctggcgctgctgctttgcgacgtcgaccatttcaaggcctataacgaccgctacggacaccaggctggcgatgcggtcctgcagcgcatcggcgcggtgttcgaggcgaatgccaggcgtccgctggacatggcggtgcgcctgggcggcgaagagttcgccctgttgctgtacggcgccaacgagcacgaggcgaggctgcgcgccgaagcgctgcgcgcacaggtccaggcgctgcgcatggagcacgaggcgtcggacacggcgcgcgaagtgaccctgtcggtcggcgtgtcctgcctgtggccgaccccgggcaacgacctgaagcgtctctacgatctctacgagcatgccgatcgcgcgctttacgaagccaaggcgttcggccgcaaccaggtggtggcctgagtccatggccgattttgtccctgtggctggcgccgccggtgactgcgggacgaggcggcgaatgctaggttcgacaggaaaaatgccaggcacggccgctcttcgcagagctgccggccccaccgcgagacgacttccggacggaccccatgcagcgcttgatccaggccaacggccaaccgcactacggcatcttcccgagtgccccgcagcacatcaattaccgcgatttcgacttccgttcgccgatgggccggcgcgtgggggccctgggcaaatggcgacgcttccatcagttccagtactttggcctgatcagcccggagctgatcggcggctgcgccctggctcagctgagcttgcttggcgtcggcttcgtctacctctaccagccttccagcggacgcatgctggagcggcgcttcaagctgccgctggggttcggaacccggttttcccagaccccggacgacggcgtctgcgaactgcgccaggggcgcaacctgctacgcctggagaaccgtatggctcaccgggagaaacgcctgctggtggaactcgacgatggcacccgcatcgacgcctgcttcagcgaggaggcgccgagcttccagccgatgtgcctgtgtacgccgaccgcggtgaacggctgggtctacgcgcagaaggtggccggcgtgcgctgtcgcggcgacgtgcgcagcgccctcggcgaccacgacctgcaggcgctggacgccttcgcccatcacgactggtcggcgggctacgcgcccggaaaccttctggaactgggcttgcctgtccggcgaggcggacggcttgcgggtcggcctgaacctgtcgtgcggggtcaacgagaccagcttcaccgagaactgctactggctggacggcgaactgctgaaggtcgacagcgtgcgcttcgacttcgaccgtgaccagccgctgcggccctggaccatccgttcatacgatggccaggtggagctgcgcttcgaggctcacggcatgcatcaggagcggctgaacctcggtctgctggcgagcaacttcaagcagatattcggttgtttcagcggtgtgctgcgtccgcgaggtcgtgccgaggtgaggatcgagcggctctggggcttcgtcgaggaccagtacgcgaagtggtagacagggcctggcctgggcatatcgtgcgacaatttgtcattgtacgggggggaattggacgggcattattagccgactaataattagtcaaatgaaatatcggacctcctttttcctatggctcagacagacaagcactatttcggcaccttgctagcccagacttcccgtgcttggcgcgctgaactcgaccgccgcctcagtcacctcggcctgtcccaggcgcgctggttggtgttgttgcatctggcgcgccatcgcgattcgcccacccagcgcgagttggcccaatcggtcggggtcgaaggcccgaccctggcgcggctgctcgacggcctcgagtcccagggcctggtacggcgcctggcggtggcggaggaccggcgggccaagcacatcgtgctgactcccaaggccgatgtgctgatcgccgatatcgaggccatcgccgccagcgttcgcaacgacgtactgaccggcatcgacgagtccgagcaggcgctgtgccagcaggtgctcttgcgaatcctggcgaacctggaaaagcgctgagcactgcgtcacgaaattccgctagaatcgccatttttatggcatcacctcctgggctttcgtccgaaagccctctacagaggttttcgtcggttttctgacgaaaaatcttgaccgtttccacggcattcctctattcagtgatggcaaaaagccatgtcttgcgccatgtggtgcgttcagccctgtacggggcgaaattcgggctaacgtgaaatagatgtagcagtcgaccgctggccggctgtgtgctcgaagtgcggagaaaagaacggaatgcccggtaaagccttgcgtgtcatgttgtgtgcctggtcgtgcctgttggccgggcaggcgagcgccctgggagtgggagacatcaccctgcattcggcgctcaaccagccgctggatgcggatatcgaactgctcgacgtcggcgatctcggcgcggacgagatcgaggtccgcctggcgggcgccgacgtcttcgccgcggccggggtggaacgcttgcagttcctcaacgagctgcgtttcagtccggtgctccaggggcgcggtggcaatcgcatccatgtgtcctcgagccgaccggtgcaggagccctacctgaatttcctggtggaggtggcccgccccaacggccgcatcgtccgcgaattcaccgtactgctcgatccgctcggttatacgccgcgcatgcttccggccgcgcgcagcgggatcgagccgcagcggcaatcctcgacgccggtgcctgcgccgcgtagtgccgcggtcgtcgtagacccggcactgctggagccgggcgacgaatacctggctcgccccaacgacaacctctgggccatcagcggacgcctgcgtggtgccggcaacgccgatcgcgcgcaactcatggaggccctgtaccagctcaatccgcaggccttcgtcaatgccgaccggcaccggctcaaggccggcgcgcgcctgcgcctgccggccggctaccagccggagcgaggcgcgcccggcgccgtgaaggaggcggccgtggaagtcctgccgccagccgatgccgccgtggtggaaaacgctccggcggctctcgtcgaggcgcagcgccaggcggatgccgaggccgaggcgttggcccggcaacgggaggaactgagccagcggatggacgatctgcaacgccagttgcaggccttgcaggaacaactgcagcagcgcgatcgccaggtcgccgaactgcaacagcaactggcccggcgccaggcggtgcggcccgcggcgccgccgcctgccgcggccgcgccttcggttgcgcaaccggttgaaacgccgacggactcgcagtactggcgctggatgatcgtcctgctgctggtcctcgctctgctcggcgtgttgctgttgcgtcgccgccgcgaagaggctcctgtcccggcggtcgaaccgaagcgccgggtcgccctgaacctgccgctgcggcgtgcgccgcgccccccggcggccgcaccggcgccggcaaaggtcgaggaacaggccaggccgccggtcgccgctccctccagcccgccgccgtctcctccgcctgctccggccgccgctccgcgcgccgccatggctgcggcggacaagctggacggcgccgacatctatatcgcctacggtcgctacggacaggcccgcgacctgctgcgtcaggtactcgccgagcagccgcagcgcctgagcgcgcggatgaagctgttgctggtgctggctgagctgggcgatgcggccggcttcgacgcgctggccgaggaaaccctggccagtggcggcaacccggaggccatcgacgagttgcgcggacgctacccggcgctgctacagatgccggcgaccgagacgccggcggcaacaaccaaggacgacgactggagcgacctgccgctggccgagccgcccgttttgcagcaaccggatgcgacctcgggcgccgacggcttcggcgacctcaacctcgatctcgatctcgactggggcgccctggagaatcccctggacaaccccgacctgccgcgccgcgccgctgccggcaaggcggaaccggcggaggaggagcccctggcgttcgagagcaatctccatgaactgccggatgtcgccgagtacgaacacctcgaactcgaccagccagagccggccacggtgccgccggaggaggcctcggccagcctggaccgggcccgcgcctgcatcgacagcggcgatctcgaccaggccagccgcatcctgcgcctggtggtggcgcacggcgacccgtggcagaaggccgaggcgcgcgagttgctggcgctgatcgcctgaactccgctcagaagttctgcccgaggttcaggtagaacgccttgaagttctcgtcgttgatcccgtagctgaaggtcagcggccccagcggcgtatcgaagccgatcatcaggctggcggcgttgatgtagccgctgtcgtattcgttgtcgttgttccagatgcgtccgcgctcgatgctgccgcccaggtacagcgggaagtccagcggcaggaaggaacgttcggtgaggcgccggtaatagacgatccgtcccaggctgtagttctgcccggacagcgcgtcgcggcggaagcccgacagctcgcgggcgccgccgagggtgaagctggaggtgaccacctcggcgtcgtccagggtgcgcccgtagccgccgccgaacacccaggtgtcggcgccgaagctgagcgccttgttcagccgcaggtcccactgccggtagctgtcgtccgagccgagggacttgtcgtagcggcgcatggtcaggccgatctcctcgccctcgtgggggaaattgacgtcgtcgacggtatcgaacgagtacttcagttcgtagtagccctcggtgaagtcgatgtccggcaggctcgggtcgccgatgcgcacgtcggccttgccgtaggcctgcaccgcgcccaggcggatttcgccgttgttggcgatctgccggccgacgttgaggccgtagccgtagcgctccaggcgatagcgcagcagcgggtcgttgtcctcggtgacgtcgacgttctgtgcctcgtggaacaggaagggcgcgacgaagtagcgcgagccgacgtcgagcggctggtagaactcgctgtagagttcctggcggtcgccgagctggacccgggtcagccactcggcgccgagccggttgaggccgttcatgcggtagctgccgccgaggttgaaggtgctttcgccgcgcatgtcgtcggacaggttgaggcccaggcgaaggaagtcggtgccgcctttcttgccggtggcgtggatcaccagggtgttgagcttcttctccttgaccacccggtactgcacctggtcgaagtagtcgaggccgtagagggtgctcatgtcgtcctgcaggcggccgaggtcgaggcgcgtgccgagcggctggcggatgtagtggcggatcacctcgtcgctgaccttcgagttgttctccacgcggatcgcgtcgatcaccggcttgcgctggttcggcgtgcgcgccacgtcgagcgcttcgctgttgaggtccttcggcttgcgcaactcggcgaggcgcgcggcgagcaccgtggtggcgcggtagccggcgtcgatcagttgcggcacgcggccgaagtcggtggtgccgtagccggacagcggcggctggatcagcacgtcgccgggcttgagcgtggccagctgggcttcggagttcttccgggtcatcagggtgatcgactggttcatcacgtcgagcacggtgctcaggtccttgcggtcgcgcagcgggttgccgatgtcgaccacgatcaccacgtccacgcccatgtcgcgcgccacgtccaccgggatgttgtcgaccatgccaccatccaccagcagcctgccgtcgatctccaccggggcgaacacggcggggatcgacatgctggcgcggatcgcctggggcaggtggcccttgcggaacaccactttctcgccggttgcgatatcggtggagacggcgcggaaggggatcgccagcttgtcgaagtcgcggttgtcgctggtgtgcaccagcaggctttccagcaccatcgccaggttctggccctggatcacccccagcggcaggccgagggtgccgtcgtcgcggaagctgatcttctgcttgaccaggaagtcgcggtcgtcctgcttgcgccggaacggcacgtccttgcgcggcggcgcgtcggacagcgcctgctgccagtccatctccagggcgatgcgctccagttcggcgggggtgtagccggaggcgtacaggccgccgaccaccgcgcccatgctggtgccggcgatggcgtcgatctggatgccctgttcgtcgagggccttgagcacgccgatatgggccaggccgcgggcggcaccgccggagaggaccagaccgatcttcggccgggcctccgcggcgagggcggacaggggaagcaggagcagcagtacgagcagcaggcggcgcatgagaacgatccggagccgggtgaaaaggcggctattataggcgcgaccgtttcccctgagccgccgacatgcccaccgccaagcccgaaatcgtcatcacctattgcacccagtgccagtggctgctgcgtgccgcctggctggcccaggaactgctcagcaccttcgccgacgatctcggaaaagtctgcctggagcccggaaccggtggcgtcttccgcatcacctgcgacggcgtgcaggtctgggagcgcaaggccgacggcggcttccccgaggccaaggcgctcaagcagcgggttcgtgaccgcatcgacccgcaacgcgacctcggtcacaacgatcgtccttcccgctgaaccgctgccgtccgcccatggcttgttgcaggtcaacgggcggcacggcgcataggcatagcctgggggcattcatcctgtcgaagggagtgcccatgagcatcatcgtcaccggcgccgccggcttcatcggcagcaatctgctgcaggcgctgaaccggcgcggcgagaccgacatcatcgcggtggacgatctcaccgacggcgagcagttccgcaacctggcggacgccgatatcgccgactacctggaccagaacgacttcctcgagcgttacgcccgcggcgacttcggcacggtccgcgcgctgttccaccagggcgcctgcgccagcaccctggaaagcaatggccgctacatgatggagaacaactaccgctacagttgccgcctgctggaaagcagcctggaactcggcgtgccgttcctctacgcctcgtcggcggcggtctacggcgccggccggaccttccgcgaggcgcgccagtacgagcggccgctgaacgtctacggctattccaagttcctcttcgaccagcgtgtgcggcgggcgctaccgcaggcgcgcagccaggtggtcggcctgcgttacttcaacgtctacgggccgcgcgaggaacacaaggggcggatggcctcggtggcctaccactgctaccagcaattgcgccgcgacgggcgggtcgaactgttcggcgaacacggcggcttcccgcccggcggccacctgcgcgacttcgtcgcggtggaggacgtggcgcgggtaaacctgcatttcttcgaccatccgcagcgttcgggaatcttcaacctcggcagcggccaggcacggaccttcaacgaggtcgccctggcggtgatcaatagcgtccgcgccaacgccgaccagccgcccctgtcgctgcaacaggccgtggaaagcggcctgctcggctaccgcgagttccccgagtcgctgcgggcgcgctaccagagccatacctgcgccgacctggagctgctgcgcgaggcgggctaccgcgacgatttccagagcctggaagagggcgtcgccggctactgccgctggctggcgcgcagcgcctgagggatcctgctcagcggcccagcgccccgcctaccggggcgcgggcgaagcgcagctccggcagcagggtcagcagcgccagtactccgagggccgcgccgacccagagcgcgccctgcaggccgaatccgccggcgatgcccaggccgccgatccaggaaccggccatcacgccgagcatgatgcaggcagtgtgcaccgagttgaccagcatgttgttatggccgacccgtgcgccgcgggtcaccagcgccgggttcatcgacaccccggtcaggccgatcaccaccagcgccgccactgccaccgccggaacctgtccgaacagggcgaaggccaccatcgcggcgatggccgccagcaggccgaaggccaggaccgcgatggtatggcggtcggccaggcggccgacgatgttgttgcccaccagcgtcgccaggccgtagaccaccagcagcagcggtacggtcgaggcggagaagccgctgacctcggtgaggatcggcacgaaataggtgaagccggcgaaggtggcgccgatcagcagcaggctggtggcgtagacccaccatagatgggcgttcctgaacaccttcagttcctcgcgcagcgagccgctgcccgccgaccccgggatcgccggcatcagctgcaacaccagcaggccgaccagcaccgccaccagcgccaccgcgaagaagctcgcgcgccagccgtaccattcgcccagccaggtggcgacgggcaggccgagcacggtgccgaccatcaggccaccgagcaccagcgacgacgcgcggccgaactggttgccttcgaccagttcggcgcaggcggtcagcgccacgccgaagaaggccgcggcggcgaccgcggtgaccagtcgcgccgcgaccatcaccgcatagcccggcgccagggcgccgatgacctggccgaccacgaacagcgcgatcaggccgagcagggcgttcttgcgcggcacccggagcagggcggtggtcaacagcgggccgccgacggccatcgcaccggcgtagaaggtgaccaggtagccgatcgcggcgaaggacacgccgaattcggcggccagcgccggcatcagcccggcgaccatgtattcgctggtggtcagggcgaagatcgcggcaccgagcacgtagacaatcaaaggcatgtttccagctcccgagcggttcagacgacgatgaagcgagccacggcgacctgcccgtgccgtggccgcgcgatgaatgcacgacggcgactcatgccgccgacgaaccgaagccctggtcggcgccttcgggcagcaccgtcacgcagtgggcgaacaggttcgaagcgctgcgcaccacggtcagcccgcactcggcgagcagggcgtggaggcaggcgcgtgaatacgagcgcgagtagaagccgtcgctgccggtgaacacggtgccgtcgtcccgcgtgtgcaactccaggccctgcaccccgcaacggcggtagtagctctggcggacgcgggtggcctcggcgctgtcgccgaacaccgagaccaccgccgccacgctgcgctcggcgagggagtcgagcagccgtttcggctcgcggaagttgcccagcaggttgaacggcagcaggtacagcgcgcgcgagccgaccgaggcaccgcgcctggtgtggttgaggatgtcgtcgaccaccgtgtccgcgcgatcgctcatgccctcgcgctcgatccgcgtgcgcagcgtctcgatcgcccgctggtcgaggtcgacgccgagatagcgggcattgagcaggcgcgcgatctccagcgcccggccgtcgtagcagcctagctcgaccagtgcgtcgcagcgcaggtaggccatcgcctcgaaggtcatcaggctttccatttgcaacaacggcagcacgtcgtccggaaagttggccagggtcattatcgtcctcggtccgaactccagctcgtagaaagccgactcccgatgcgtcccgatcgtgagatccatgttctgactcacctcttcctccagcgaatctcgctctggtgttggttgatcgaaggcgatgcgcgttcccatgtcccggcaccgccttcgcctggcagagaagcgacggaacgccggcgttcgctggcctcaggcggcgcggtgcttctcgaccagctggaacagttcgtccaccgtttccagcaggtcgagttcgtcgtcgaccccggtgacgccgaactccttgcgcagcttcagcgacagctcgctgaccaccagcgaatcgaaagccaggtcttccatcctgctgtcccggctgatttcctccttcggcacgccgctggcgacgctgagcacggtgaggagatggtcttccatgtcgttgggcattgttcttccctcttcagtccattgtcggaacgatcttcggccagcgcagggcgaccgaaccccaggtcagtccggcaccgaaaccggtgaggaccatgttgccgccgtcgcgcaggatgccttggcgcaggccgtgggccagggccaggggaatcgaggcggcgacggtattgcccacctcggcgatgttgctcaccactcgctcgacgggaaggtcgagctggtcggcgaccgccgcgagaatgcgtgtgttggcctggtgcgggaccaggtgatggaggtccgaagcttgccagccgacccggtcgagcacccgccgcaccgagtcgctcatctgcgtcaccgcctggccgaacactgccttgccgtccatccggaagtagttggaggcctgtccggaactgcgttcggcgcgactgacggcgggggtcatcagcaggtcgaactggtggccgtcgctgccgaggtcgaaggccagcagcgcgccttcttcctcggcatcgccggcacgcagcaccaccgctccggcgccgtcgccgaacagtgcgcgggtcgagcgatcggcggggtcgagggtatggctgaaagtgtccaccccgaccagcagcgcgctgtccgccagcccggcgctgatcagcgagccgacgctggccaggccgtagacgaagccggtgcaggcggcggacaggtcgaacgcgagcgcgccgaccaaccccaggcgcgccgcgaccctgggcgcggtggccgggcagcagaagtcgccggtgctggttgccagcaccaccgcatcgactcgctccagccccgccgaggcgagcgcggcggaggccgcccgcagggccaggtcgccgctgccgaggtcgccggcgatatgccgctggcgcacgccggtgcggctgctgatccaggcgtcggaagtgtccagctcggcggcgagcatgtcgttgctgagcacggcctcgggcaggtagctgcccaggccgcagaccacggcggcgcgcggcatggctcaggctccctggacgatcttggcggcggcctcgaccccgcccagggcctcgaggtgccgcagcggattccagaagtcgcggtagagcaggatctgtccgtcgcgggtgcgcagcaccgagatgtagtcctgcgccagcttgccgccggaaacggtggccacgccgtcgccatggaattcgccgatggccaggtcggggtcggcggtctcgtagaactgcacgtcggtgaagcgcacggtcaggtgctcgggaaacaggcgcatgtgcgcccagatggtttcgcggccctcgaagcgggtcttccagcccggcggggcgtaggggaattcgagtacgccttccggatggaacaggtcgcaccagccacgggcatcgccgttttccaggaggcgcaggctgtggacgagaatttccttggcattcattgggcgatcctctcgatcgggttggcgtgggaggcggtgttcgccggggcgctgcatccggtgcgcaccggcacgctgatcagggcgcggaggaaggtgatcggcagccattgcagctccgcgtggggcaccgccaactggaggtcggggaagcgcgcgagcaggcgctggatggcgatccgcccctccagccgggccagcgaggcgccgacgcagtagtgcacgccgaagccgtagccgagatggccatcggtgttgcgggtgaggtcgaggcggtcgggatcgtcgaagcgctcggcgtcgtggttggcggtcaggttggagaccaggatgtattcgccggcgggaatggtgaccccgtccagttccacgtcttctacggtgaagcgcaacatcgaggcgcgcaccggactgtcgtggcggaccagttcttccatggcgttgggcaggagttccggctgcgcccgcagcaacgccagttgctccgggttgaccagcagggtgaccagcgcgttgccgatcatgttcatggtggtctcgaagccgctcatcatcagcaggtgggccatggagacgagttccgcttcgctcaactggccgctctcgtcggcggcctgcaccagcccgctgtagacgtcgtcggccggctgccggcgcttggcctcgagcagcacgcgcaggtagtcgacctgcgcatcggccagggcctgggcctcctccggcgacagcagttccgcctggcgctcccaggactggcgggcgtgttcgcgctcggcctcgggaatgcccagcagctcgaagatcaccgcgatggtcagcgggatcgcgaagtcggccatcaggtcggcctgttcgcggccggccatggcgtccagcaatgcctcggtgatccgttctatatgcggttgcaggcgctccacctggcgcggggtgaacgcgcggccaaccagcgagcgcaggcgggtatggtccggcgggtcgaggttgagcatgtggtggctgagtccctcgccgatccccgcgcgcgggctgccggtacgcttcgcgtagagttcggcggcctgccgggcgtcgcggcggacgcccggatggttgaggaccttgcgcgcgtcgcggtagcgcgtcaccacccacaccggatgctcggcggcgcgatgcgcgggacgcggcgcgccgtccacctgcaggccgtcgtagagcgcgtgcagtggcgagatcagttcctcgcccagtctcagtttgcgatcaggcacgttgctcctccttcgccgccggggcggcggtgacgatggggcggaacatcccgtcgatcacgctatcgggcagcagccgcgccagcagggtaccgcggcgcacgtcggcgccgacccggtagcgggtccgcggcttggccgcggtgagcgcggcatgcaccgcggcggcgacatcggcgggcttggtcgcgctgttgcgcgcgccgtcctcgttggcctggaggaagcgcaggtaggtatcgcgatagaggtcggcgacggcgtcgggggcgtcggccagggcgcgctcgccctcgctggcgatcttgccccagatcggcgtccagatcgccccggggctgaccaccgagacctggatgcccatgggtgccagctcgcggcgcagggcgtcgctcactccctccttggcgaactgcgcggcggagtaggcgcccaggtagggaatggcgaccgagccgaggcccgaggtgacgttcaccaggcgcgccgcgccgccacggcgcagcagcggcaggatcgcccgggtcaccgcgagctggccgatcaggttgacttccagctggcgccgcagcaggtcgctggagacgcattccagcggcgcggaaatgcagatcccggcgttgttcaccaggccccagagcccggtatcgccgactttctccgccacctgcgcggcggcccggccaatggattcctcgtcggtgacatcgatcagcagcgtgctgatccggccggacgggcaggcgttcgccaggcgctcgccatcctcctggcggcgcaccccggcgatcacctggaaaccctgttcggccaggtgcagcgcggtttcccggccgaggccgctggaggcgccggtgatcagtacgtggcggccctggggcgagagaggtttgctggtgaataacatgtcattgctcctcgagggcggatcgttggggggcgtggatcgccgacagcagggtgcccaggcaatcttcggccaggcgttcggcgcgttcgccggggaccgcttcgtcgatataggtgaagttccagaacagccggccatggctggagttgatggcggccacgaagtagccgttcaccgagatgccggtgaggaactgcgcgtcggagaggcgcaaggcgccgatccgctcggggaacggatagcgaccgatgttggaggagcacaggttgatcggcccttcggcttccatgaaggccatgaatggccgcgcgtcggccatgcagcgcggcgcagcgctggcgaccagggtgaccaggttgaaatgatggccctggcgacggcgttcgccgaggtcgtcggtgagcgcgcgggcgacctcccagaacggccgggcgatgtccagcaccaccggtaccgtggcgacgtaggtgcctacttcgtcggggcgcaccggcggctccagttcgtcgcggaagtcgatcggcgagccgatggcgatgtggctagggcggcgctggtggtcgtggccggcggcgatggccagcgccgcggtcagcgcgccgtgtaccgtggtgccgtgttcgcgggcgcgtcgttgcagctgttccagctgcgcgccgtccagctcccggtgcagcaggcgggtacgccgcgcttccagcggcaccgggttgctcggctcgatccggcccgggcggtggcgaccgaccagcgcttcgtcctgggcggtctgctcggccaggcgcgccgcgccttcgtcgccggtgaagcggcgcggacgcagatcctccgccggcggcagggcgctggcggtccagggttgcgcggcggggtcggcggccagggtcagccattgttcggcgagggtcagcacggtagtgccgtcggcgatgatgtgcggtaccacgaccagcaggtcgtgggcgccggcgtcggtggcgatcgccacggtacggatcagtggcccgctgtccggatcgatgcgttccggcaattcgcgctcgttgatttcccgcagccattgctcctcgccgccgccgcgcacctcgcgcagcgggatgggctgctcgcagggcacccagcgcggatcgagcccggcatcgtgctcgatccgcgcgcgcagcagcggatgccgcgcctgcagcgcgtcgaggccgcggcgcaggtcgtcgatggacaaccggccatggacccgcacccgggaaatcacgttcagcgcggagaactggtcgctgagccagtaccagcgttccaccgcggacagcgggcgtcgtatctcggccatcattcgactcctgggaaggtcagtgccagttcgttctgccgggcgaaggttcgctccggagcgaagcggaagtagagatcgcgggcgacggtgcgcagcggatgctccaactgctcgatgcggctcagcgcccgcgaggtctcgaccatcgccctggcgcggtcgcgacggcggttctcgtaggcgcgcagggcggcttgcgggtcgtcgatggtggccaggcagtgggccagcaccgcggcgtcttcgatggcgatggcggcgccctggccgaggctggtcagcatcggatgcgcggcatcgccgagcagggtcaccgggccgtcgccccagcgctccaggaacggtcggtcctgggccggcaggctgctgatgtcggcctccggggtcgcctcgatgaccgcctgcacttcgtcggcccagccggcgtagaggcgctggatgcccgccttgccgccgcgccagtccttcgcctgttcggccggcatgttgcgggtgccccaccaatagacgttgccttcgccgatgtcggcgagaccgaagcgctgcccacggccccagtaatgggcgacgtagcccggcgtcaccttcggatggcggaacgccggcgtggcgcgccagatcacgtagtgccagtcggtgggacgctccgggccggtcatggtggcgcggatcgccgagttgaagccgtcggcgccgatcagcacgtcggcgtgcacttcgcggccgtcgctgcagagcacggtgacgccttcgccgtcggcgtggcgcaggtagccggtggcgctcacgcccagttcgatgcggcagtcgcgggcctgttccagcagcgcctgctgcaggctcgcgcggtggatcgccaggctcggctggccgagctgacgggccaggccgccgaagtcgatggcgcggatcggtcgcccgcgccgggtgaggaaccgcagcgagtcgaaggcctgggcgcgggtaaggtcagggcgcacgccgaccctctccagggcggtcagcgcgttgggcatcagcgacagcgccgagccgaccgcgcgcagctccctggcccgctcgtagagttcgacctcgaagccggcggccttcaggcaggcggccgcggcgagcccgccgatgccggcgccggcgatgacgatcttcagggggtgtctgctcatgggcgggtccgttcgctggaggtggagggttcgagcaacgcggcgatctctgccgcgaccgtctcgacatagggttctttcatcagcaccaggtggtcgccggggacgtcgatcacatcgaggcggccactggtccagtgctgccagccgttcttcgggtcgccgtagtgggtgccggcggcgtcgtgcatcggcttcagcgccagcggcagcgggccgtccgcgcgcagcagggtcatgtcctggtcgctgacttccgggcgatagccgatgagtgcctgccagctcgcccggaacagctcgtagagacgctgcacggtggcgcgcggggtgccggcgggaagtacgccggcctcgatggcgcgttcgacgatgtggtcgagcttctgctccaggctcgcgccttcaggcagcggctcgacctcctcgtcgctgcgctcgaaccagaccagttcccagtagaagaacagcagcagggcttcgtcgctggcgctgccggcgtggttgcggtcgacggtgatggagtcgagcacgatcagttgggcgaccgcctgcgggtcgagcgcgcgcagttgccgggccatctcgtaggcgacgaagccgccgaacgaccagccgccgaggtaataggggccttccggctgcacccggcggatcgccgcgaggtaactggcggcgatgtcctcgaggaccgccagcggcgtactgccctggccggtgccggccgcctgcagggcatataccggctggtccggcggcagtgcgcggaccagcggcaggtagcagagcacgtggccgccgagcgggtggacgaggaacagtggcgggcggctgccgccggcacggatcggtaccagcgggtcgaaggcgcgcaccgccgagcgttcccgcaggcgttcggccaggccctccacggtcggcgtctcgatcagcgcggccatcggcaagtcgacgccatagcgcttctcgatcagcagcatgaagcgcatcgcgctgagcgaggtgccgccgaggtcgaagaagctgtcgcggatgcctacccggggacgatccagcaactcgccgaggagtccggccagggtgcgctcgtagtcgtcgcgcggggccaggtactcgatgttcgtcccgtgctccagcggcagtgcgcgcagggcggcgtcgtcgcgcttgccgctgggggtgagggcgaagccgtcgacccaggcgaagtgtgccggcaccatgtgttccggcagttcgctgcgcagtgcctgcttcagttcggcgagatccaccgcctcgggctcgccgagcaggaaggcagcgaggaatgcatcgttgccctggcgctcgcgagccaccaccgccgcgccgcgcaggcccggctggcgctcggcctggcgcatgatcgccagctcgacctcggccggctcgatgcggaagccgcggaccttgacctgggtatcggcgcggccgagccagacgatctcgccgttgccgaggatgcgcccgaggtcgccggtgcggtagagcctggcgccggggcgccagggatgttcgacgaagcgctcggcggtgagttcgggggcgcggtggtagccgcgcgcgaggcagtcgccgccgaagtacagctcgccggtaacgccgaccggtaccgggcgcagcgcggcgtcgagcacctgcacctcgaccccgtccagcggccggccgatcggcggcaggtccgggtagtgcgccggatcgccgctcagcgagtggtaggtgacctggtgcgtctcggtgggaccgtactggttctccagcagcagcccgggcatcgccgcgcagaacgcgcggacgtcttcggtgatgcgcaactgctcgccggaggacaccaccacgcgcagggcgccggggcgtacgcccagggtgttggaggcctcggcgaggcgttgcagggcgacgaagggcaacagcacgcgctggacctggcggcgttcgaggacatgcagcagcgcggaggggtccatccgctcgcggttggagatgagttgcagctcgccgccgccgcacagcgtggagaagatctcctggaaggccatgtcgaagctcagcggcgcgaactgcagggtgcgcagccccggtacgccgctggcgacgcgcaattgccactgggtgtagttggcccacatccggtggctaagctcgacgcccttcggccgcccggtggaaccggaggtgaacagcagcatggccagctcgtcgagctgcggcgcggcgaaggtctcgggctcgatgtcggcgaccagttcctctaccggcagcacccgttccgccgcggcgacatgggcgtgctcgggatgcgcgaccacccggaacggctgtgcggtctccaggatcagcgccaggcgctgcgcgggatagctgacgtccagcggcacgcagaccaggccggcgcgcaggatgccccagatcgtcgcgatcatctccggcgaacggttcagcgccactccgatcgcatcgccgcggcgcgcgccggcgcggaccaggcgggtggccacgcagcgcgccacatggtcgaggtcgcgataggtccagcgttgctcctcgaaggccagcgcggcgctgcccggcagcgcctcgacctggcgttcgaacaggctgacgacgtcgaccagcggctcgggctgggaagcggcgtcgcggcgaggggcgaggaaggcgaagtcggcggcttcgtcgggatgctcggcgaggcgccacaggagctcgacgaaggtcgcgccgatcagcgcggcctggctgcggctgataccgcggccgtcgctgtcgatgcgcaggtacatgccgtcgctgggcgtggcgatcacgttgaccagcagggcgaagttggtttcttcccagacgcggaagtcgcgcagttgccacagcggttcgaggacatgcaggttgacgtagttgaaggcgctgctcagttcgtcgccgacgatctgctggatggcgctgagcggatagcggcgatgggcgtgtccgtcgcgctcctggcggaacagcgcatcggctacctcgatccagctatgcccggcaatctccgagcggaccggcacggtattcaggaacaggccgaccatgcggtcggcgtcgggcagttcggggcggccgttgctgatcgcgccggtgaccacgctgtcgctgcgggagaacagatgcagggtcaggcaatgggcggcgagcagcagcgatttcaacggcagtccgcgttgcgccgcagtggccttgagtcgttcgagcagcccgtccggcagcgtttcgcgatggctggccggaccttgcgcggcttgcggctcgtgggcgccgaagccgtcgaggcgggtcatcctcgcgccctccagcagccaggtccagtaccccacggcggccggcgaagccagcgcggccagctcctcgcggacatggcaggccagcgccggcgcggggcccggcagcggctcgccacggtaggcggcgaccagcgcgacgatcaggttggccacgctccagccgtcgaggatcgcatggtggaagctgaacaccaggtccaggccgtcctcgcggacgaacgcggcgaacaggaacagcccgggctgttgcagcgaatagcgatggaagcggcgttggcggatgtgctcgtcgagcaccgtcccggcctccgggttgccgcgcaggtccaggatcagcggttcgctgcgcgcctgggtatgcaccagttgcagcggttcggatgcaccgctgaggtcgaacgacgaacgcagcgcgggataggcggcgaccacccggtccagcgcgtggcggaacgcggcttcgtcccaggccaggtcgaagcggtagtggaacacgtcgtggtagaccgacgagtcggggcgctggcggctatggaagagcaggccgagactcagccggctggtcgggaaggcgtcctccagcccttccaggcgcggcttgtcgacttcggaaaccagttcgaagggctggtagcttcgctccgcgagcggacgcaccaggcgctcggcgaggcccgccaccgtcgggttgcgcatcaggtcggcgagttcgaagcccaggccgcgccgctgtgcggcggcgcggatgcgcagcatcaggatcgagtcgccgccgagggcgtagaagtcgtcgtgcacgccgacctccgccacgccgaggacatcggcccacaccgccgccagttcggcctcggtcgccgtgcgcggcgcaaccgccgccacctgttccggcggtgccggcagttgccggcggtcgagcttgccgttggcgctgagcgggaggctgtcgatgcgcacaaagaaggctggcagcatgaagtccggcagcgtcgccgaaagtccggcgcgcaattgaccggggtcgagttccgccgcagccacgtagtagccgaccaggtgcgtgccgcgtaccgccgaatcgcgtgccacgaccgcggcgtcgcgtacgccgggaagcgcggcgaggcggtcgcgtacttcgtcgggttcgacccggttgccgcggatcttcacctggtcgtcggcgcggccgaggtattcgaggttgccgtcggccagccagcgggccaggtcgccggtacggtagagacggccgccggcgacgaaggggtcggcgaggaagcgctcggcgttcaactccggccggttcaggtagccgcgggcgacgccgacgcctcctatatatagctcgccgacggcgccgaggggctgcggcctgagcgcgcggtcgaggacgtacaggcgcaggttgtcgatcggccggccgatcgggacccgcgtggggttgtcgctggcgcactcatggtcggacacgtcgacggtggcctcggtcggtccgtacaggttgaccagtcgcacggcgtcgccgaacagccggcggaagcgcgcgacctgcaacggcgcgagggcttcgccgctgcagaacaccaggcgcagcgagcttgccgccgtgcgggcggtcgggtcgccgtcgagcaggtcgaggaacggcgtcagcatcgacggcacgaagtggatgaccgtgaccgcgtcgcgctggatgctccgcaacatttcccgcgggtccttctcggcgccgggcggcaacagcgacaggcgggcgccggtgaaactccaccagaacagttcccagacggacacgtcgaacgtcaccggagtcttttgcagaagcacgtcgcgttcgccgatcggataacgacgctgcatccagttcaggcggttgaccaccgagcggtgctcgaccatgacgcccttgggcatgccggtcgaaccggaggtatagatgacataggccaggtcgccgggcgccacgttggccgccggcaggtcgccggtgctctgcggcaggcgttcgaggtgcagcacgcgcgtctcgccgaggctctcgccgagtgtcgctgcgcgctcgtccaccagcaccacgcgggcaccgcagtcttccaacagcaggcggacgcgctccaggggatggtcgggattgatcggcacataggcgccgccggcgcgctgcacgccaaggatcgccggcagcaggtggggaccgcgggcgaccagtagcgctacccgctcgtcggtcctcacacccgctgcgcgcagggcgtcggccacggcctggaccttggcgtccagctcggcatagctgagcgtgccgccgtcggcttccagcagcgcggtgcgttgcggggtgcgcgccacctgctcggcgaacagtgtgggcagggtagcctgctcggggaatgcctggtcggtggcgttgcgggtgtggatcagttcctcgcgctcggcggccgacagcggatcgagttcgccgaggcggcgctcgccgccctccaccagggcgcgcaggaaggtttcgatatgccgcgccgcggcgtccatggggaagtcggcgtcgaacacatcgcaggcgtattcgaaatccacctgcgcgtcgctgtgcccgtcgaactcggagacccagatggccagcgcgtccgggtcatgggcgtgggtttgcgccacggtctcgacgctggcgctcgggatcgcctgggcggcgggccagcgcatgtaggaaagggtggtgtcgaacagtggcgaggcgccgcgcaacaggtcgccgaggggcatcttctggtggcgcagcagcgtccgggtcgcctcgcgcaactgcgccaggaattcgtcgacggtctgttccggcgcggtgcggatgcgtagcggcagggtattggcgaagtgcccgaccacttgcttggccgcgcggtcggcgcggttcagcaccggtacgccgaggaccacgtcgtcgttctggtggatccgcgccaggtacagcgccacggcggcggagaggaacaggaagggcgattcgccacgatcgcggatcgcatcgagcagtgtgcgttccagcgtcagcctgtggcgcgcggtgcggcgcagcccggccgggcgcctgcgggtgaagagggccggctccaggccctccagggcctcggcgaaataggcgcggtcgccgcggtactgttccgaaccggagtagtcgtcggtctcgagttgcgccaggagggaagccgtcggcatctgcgcctgtggctcgcctagctcgcccaggtagccggcgcgcacccggctgaggaatagctgcaggccccaggcgtcgctgacgatatggtgggtgcgcacgtagacgtagagcgcctggtcgctatgcagcagggccaggtccaccaggctgcggccgtccagcgggtaggcgtggcggaaggcgtcgcgcagccaggatcgcacggcggcctcggggtcgcggtcggcgcgcaggtcgacgtggcgcgcctcgaactcggcatccgtgtccagccactggtacggcgtaccgtccgtctcgccgaggcgcaggcggaacgcctcggtgtctcgcgccgcctgcagcagcgcccgttccagggcctgggtatcgacctcgccggtgaagcggtcgtagctgaagatggtgtactggtcgagttccggaaactgcgcggcggcgacccagatgtcccgttggtagggcgatagcggcaagcgagcgaaacgaaccatccctgcgtcctcttcaacaatccatcgattcggcgaacacgggcaccgcacgcctcgccggacaggttccacccgtcgacgtttcagcgcgccgtagccagcgtggttggcagggaagcggcggcacccgaagcaagagcggggtgtactattacttttggcaggctcgaagaaatagctgttaattcttgcagggtaatcgcgttgttaactgttaattctggtaggtatttacgaggcaacttacaaatctgttaggttccgggaaacgtgcgtcgcggccctgcatggctatgcttcacgagattaccttcgccggtcttttcgaagttgaagcaagcctttcgaaagtgtctggctgatgcataatgggccgctcggaagaggcgcattaacggatatatatccgcgccctggcgaacaacgaacgcatgccctgaaaggtttgccggatggattaccaacagttccaggaggttgcatgaaaaccgatgacaaggaccgcgaaggcggcgactcccacggcgccatcggcgccaagctgatggagtacgcgctcaaggtcaggaaggtgttcgtcaccggcggggtcgacgagaagatggccaaggacgtcgtccagcagctgcacatcctcgcctcgatcagcgacgatccgatctacatgttcgtcaattccccgggtggccacgtcgaatccggcgacatgatcttcgacgcgatccgcttcatcacaccgaaggtcatcatgatcggttccggcagcgttgccagcgccggcgcgctgatctatgccgcggcggacaaggaaaaccgctattcgctgcccaatacccgcttcctcctgcaccagccgtcgggcggcatccaggggccggcgagcaatatcgagatctaccgccgcgagatcgtgcggatgaaggaacgcctcgaccggatcttcgccgaagccaccgggcagacgccggaaaagatcagtgccgacaccgagcgcgacttctggctgaacgcggaggaggccgtgcagtacggcctggtcaacaagatcatcgtttcggaacgggagatcacgctgcccggccagtgagtttccgcaggccggataaatacgaaggcgggcgcgaagagcgtatttcccgattctcttctcgctcgcttttctttctttaatttccgatcgatagggtaacttttcttacttttattttgcttgttctcaaaatgccatcagcaagaatggctggcttttgcaaagtctcacgtcgcgcgcccgttattttcaatcattctatcgaacgacatttttcaggcttacggaaattaccttccgtctgccggccttgtttgactcgacctgacgtaacaatggacaagcgccgggaaagttccagcttccgcggcgcttgccggtatttccagtgaattgttttcaggcgttcgccgcgcgccgggccgccggcgagttggccaggtattccagggcttcctgggtattcgcctcgtgctcggggtggtaccagggattgaagtaacgggcgacgtcgcggaaggtgcgcgcgaggttcggcagcaggccctgcttgccgagccgccaccaggttcgtaggaatccctggcgcttggcgccgcgcaggctcgggtcctggtcgaggagggtgcgggtgccgtcggcgagcaggtagaccagtatcgcgatgaccaacagcatggtcagttgccgggtgacgaagctgccgcccagatgcacgtgcaggtcgtgggcgacgctgcggtgctcgacttcctcggcgccgtgccagcgcagcaggtcgagcatcaccgggtcgctgccgcggcgatccagctcccgggcctccagcacccacttgccgagcacgcaggtgaaatgctccaccgcggcgatgatcgcgcagcgctggcgcagccaccagccgtcgagggcgcgggtcaggtggttctgccccaacgggtagtcgcagagcaggcgttcgaaaaggaaatccatcttgtcggtgaacggcttggagtcgatgtcgaacctgctcaggtagcgctggatcgcgccgtcgtgggcccgcgaatgcatcgcttcctggcggatgaaaccctgcacgtcgtcgcgcaggcgggcgtcgctaaccagcggcagggccttgttgtagaggcggcagaaccacagttcgccggaaggcaggagcatgtgcaggacgttcatcacctgggacgcttccgcttcgccgggaacccagtgcaggggggtatcgctgaagtcgaagcggaccttgcgctggaccagcttgtggtggaattcgctcatggcaggctctcaggaagtcaggtcgaagcgcgcgagaaaccgcgtggcccagggcgcgaagcgccattgcagggcgccgaggtgcacctcgctgcccaccgagaccaccgccttgttgcgctccacggcgcgcaccagcttttccccgacggtgtccgggctgagccggcgtcgcttgtagaagcgctggatcttcgcctggcgccgcgcctggcgttcggcgtccatgccgacgaagcgggtggcctggacaatgccggtatcgacgaagcccgggcacaccgcggtgactccgatcgaacgtccggccagttccgcccgcaggcattcgctgagcatcagtaccgcggccttgctggtggcgtaggcggggtagttgcgcgacggcgcgaaggccacgccggaggcgacattgaccaggtgccccggcttgttcgccgcgatcatctgccggccgaacaggcggcagccgtcgatcacgctccacaggttgacccgcagcaggcgctcccattccgcgggcgaggtgtcgagcatcggtccggccatgccgatgccggcattgctgactaccacatccgggactccgagggtgtcgcgcacccactcggcgaaggtctccatggcctgggtatcgccgacgtcgacctggtagacatgggccgtggcgccaagggcgcgggccagttcggcgctgcgttcggcggcttccagatcgagatcggcggcgagcaggctggcgccgcgctcggcgaagctgagcagggtcgaacggccgatgccgccgccggcgccggtgaccaccaccagcttgccgctcatcgagcgcgcgtcgggccggacctgggcgcgttgcagggccggcggcgactcgccggtttcctgggcgtcgatgaactcgccgagccagccggccagttgctccggctcggccagcagttgccaatggccgacgctcgcctcgcgccgccacaggcgtggcgcccacaggctgaggtgctggaacagctgggcgccgacgtaacggtcgcgggtcggtacgatcagttgcaccggcacttcggtgtggcgcttgcgcggacggaacaggctgcggatgaagttgccgcggtacagcttgaccccgtgccggccgtcgctggcctgggtcgggttgacctgcggatggcggacgccttcggcgtgcttcaggaactgcggccagagccgggccaggccggcgctccagagcagctcgggtacgacgggggtatggaagaaggcgatgtaccaggagtggagcaactggccgaataccgctttcagggccttcggactgcgctgcctgaggtgttcgcgcatccagaaaccgacatggtccaggcagggcccggagatcgaggtataggacgcgatcagcggtcggcactgcggatcggtgacgctttcccaggtctggatcgagccccagtcatgggccagcaggtgtaccgggcggtccgggctggtggcgcggatcaccgcctgcaggtcttcgctgagccgctgcaggtggtagtcgcggctccagcgtggcttgtccgaagcgccggcgccacgcacgtcgtaggcgacgatgcggtagcgcccggccagttggcggatcagcggcagccaggtctcgtggttgtccgggtagccatgcaccatcagcagcgtcggcttgccgttgtccggcgcgccccagcaatgaaccgccaggcgcacgtcgccggattgcacgaacaggcgttccggctgcaggtcggggagggcgaggagcgcgttcatgcggcctcccgtgcttgcggcagcagtccgcgcgcctgccagcggcggacgtgcggcaggtcgtcgtcgagccagtaggcgtcgtcttcggtgaccaccagcagttcttcgaacttggcgcccaccccgcgtagccccaggtgcggttccaccgcccagagaccgggcgtcggcgggtgctcggagcgcttgccgctggaccacagcggcgaccagccttcgcgcttgccggtgaccagcgcgttgcgcgtcagggtgtacaggttgcgcacgccgaagcgcgccaccgagggaccgcggcggttgccgagcttttccacgcgatgggcgagcacttcgaagggataggccttgtgccgtggcagggtgccctggatcacgcagagccggtcgaccgcctggctgacttcggccagggggcgccgttcgcggaccaggtcaaggatggtgcgtcggtgtatcagcaggtcgtccatcagccgctcctgcaacaggttgtggcctagtgcgccggagtagccgacatcggcggtataggcgccgagggtcggcgcgcagtcgaggatgaacggcatgccttcctccaggcgctgcttgccggggtagaaggccaggttgaagccaccgagatgacgcaggccgtcgaagcccttgaacgaggtgcggctgccgaaccaggcgaagggctggtggaaccagtcgtcgacgccatgatcctgcagccaggtcttcatcagcgccgcggcttccctctcgctgatgccggcgcgcagttcgccgtggatggtttcgcagcaggtataggccagtcgctggacctggcggaagtgatcgagatcgtcgggagtgggtacccaggcgccttgggacatggctctctccaggctggcttgtcgttattgtgacattgattgatgtcatggttgatgctggcccataagcaggcgttgcgccagccctgggaagtctcttcacgccggtgttacggcacttgctaccggcgccggaaggcccggggcagaaggctcgggacgtttcccccggtttttggcggtggtgccggagaagcggctgaccgacgagtccagtctttggttggcgcccgcgcatccggacgccggcaaagagcgttgcgcccccggaggttgtggccgttcggcgggcctcgttatgatccgcctccatgagcacacccctgaccctcctgcagcgcctgctgcaacgtggcgagcagccgtccgccgaggatgcccgcgaatacagtgtcgacgaactggcgcgcgcggccggcagcagcgtgcgcaacgtacgtgcctaccaggaccgcggcctgctaccgccgccggagcggcgcggccgggtcggcgtgtatttcgacagccatctcaagcgcctgcggctgatcaaccagttgctcgaacgcggctattccagcgccaacatcaaggaattgctggaggcctgggaacagggccgcgacctcgaccacgtgctcggcctggaccaggcgatcatcggcgagtggaacctggagacgcccggcagcatcggcttcgacgaactccaggcgatcttcggcgacgaactgaacgaccgggtgatcgacaaggcccaggcgctgggcctgctgctgttcgacggcgagtgcatgaagatccccagtccgcggctgttccaggccgggctggagctgtaccgcagcggcatcccgctggaggcgttgctcgatcacctcggcgagttgcgtagcgacaccgagcacctggcggcggggatcgtccgcctgatcgtcacccacctggtggacggccgcggcaccgacctgctgcccggggcgccggacctgcaggagctggccaaggtattcctgcgcctgcgtccgctggcggaacacgtggtccaggtggaactggcgcgaggcctcaagctgtcggccaacgaaatgctcggcgagcgtgtcggcgagatgctgcgcaagctggaaaagccttcctgactcttcttcagatcttccgcgccgccgcctggatctgttcccgcagccaggcgccggccgcttcgcgctcggcgtcgccgcgccagatctgcacgtagtcgaagcgcgggatcgccagcggcggctcgcagaccgccagttcctcgggtaaccgcaggcgttcgaggatgcgctcggcgatggtcagtaccaggtcggtgccggccagcagcgccggggccacggtgaagtgcggcagggtcagcgctacctgccggcgcaggccgcgtttttccagggcgctatcgacttcctcggccgggttgtcctgtagcgagacgcgcacgtggcgggccgccaggtagcggtcgagggacaggccgtcggggcggtcgaacaggctgcgccgacagacgcagacgaaacgctcctcgaacaggcgcctggcgcgcacgccctccggaagcagggggaatacccccagcgcgcagtccagctgtccttcggcgacctgccgggcggtttccaggcgcggttcctggactatcccgaagctcaccccgggcgccagcgcctgttgctggcgcagcagcgccggcagcaccacccaggcgccgtagtcggacatgcccaggcggaagtggcgtcggctgcgcaccggttcgaaggtcggcccgccgatcaccccgcgtacctggtcgaggctggcctggagcttcggcgccagctccagcgccaggctggtcaactgcatgcggcttttcacccgcaccagcagtggatcgccgaacagttcgcggagacgcccgagggcgtggctgaccgccggctgcgacatggccaggcgctgcgccgcgcgggacacgtggcgctcgctgaggagcgcgtcgagcaccaccagcaggttgaggtcgatacggcgtaggtcatgaatctgctgcatggaaggtgtaccaaatatcgatttccattcgcgaagtggatagcaaaaactctgctccagaggcaagggccggaggaggagaatcagcatgcccaattatctgatggtactgatggcagtttcggtgggcggcatggtggtgctgcaggccggcagcaacgccttgctcgggcgcctgctcggccatccgctgagcgccagcctgacttcgctgggcgtcagcctcggggtggtcagcctgggcctgctgctggtgcgggtgccgctgccggctaccgccagcctcggcggcgcgccctggtggagctggctcggcgggctgttcggcgcggcctacctgacggtggcgatcctggtcgcgccgcgcctgggtgccgccactttcatcgcgtgcgtggtggccgggcagatgctggtctcggcgctctgcgaccagttcggctgggccggtttcccggtgcgccgtttgtcctgggagggctatctcggcctggcgctggtggtggcgggggtattgctcctgcaatggcggggaagagcgtgaggagagtgccggcgaaggctgtcaagtggaatctggcctagaccaaaatcttgatctcaaactgtgatgaagttggcatgaatagttgttgcaaagcgtgttgaaaccaaagcgtctttttccctcactagcgtcgtcggggttcgaacagcttgctgccgagtgagcctgcgggcgtcatggatgcgctcggcagccctgtgccacaccctgacctggtgagtcccccgatgatttcgaaaagcagaagaagcttcatccgcctggccgccggtacggtcggcgccaccgtcgccaccagcatgctgccgtcgagcatccaggcggccctggcgattcccgcgcaccgccggcatggcaacctcaaggacgtcgagcacgtggtgatcctgatgcaggagaaccgctccttcgaccactatttcggcaccctcaagggcgtccgcggcttcggcgaccgcatggcgatcccgctgcccgatggccagcgggtctggcaccagaagggcagcaagggcgagatcctgccctaccacttcgacaccagcaccaccagcgcccagcgcgtcgacggcaccccgcacacctggccggacgcccagcaggcctggaacgaagggcgcatggacaagtggctgccggccaagaccgagcgttccctgggctactacaaggagcaggacatcgccttccagttcgcgatggccaacgccttcaccatctgcgacgcctatcactgctcgttccagggcggcaccaaccccaaccggctgttcctctggaccggcaccaacgacccgctcggccagcacggtggtccggtaaccaccaacgaccacgacagcaacggcccggtggagcagggctacacctggaccacctatcccgagcgcctgcaggctgccggcatcacctggcgggtctaccaggacatggccgacaacttctccgacaacccgctgatcggcttccgccagtaccgcgccgcggcgcctgactcgccgctgatcgtcaacggcctgagcacctggaagctcgatgcgctgaagcgcgacgtgctggccaatagcctgccgcaggtgtcctggatcgtcgccccggccaagtactccgaacaccccggcccgtccagcccgatctggggggccgagtacacttcctgggtactcgacgcgctgaccgccaacccggaggtctggagcaagaccgcgctgctggtgatgttcgacgagaacgacggcttcttcgaccacgtcgccccgccggccgcgccgagcctgaacaaggacggcacgctgcgtggcaagaccaccgccgacgccaccctcgaatggcacaccaagggcgatatccgttatcgcaaccagccctacggcctcggcccgcgggtgccgatgtacgtgatctcgccgtggagcaagggcggctgggtcaactcccaggtgttcgaccacacctcggtgatccgcttcctggagcagcgcttcggggtcatggagccgaatatcagtccctggcgtcgtgccgtctgcggcgacctgacctcggcgttcaacttcgccaacccgaacaacgagccgttccccgaactgcccgacaccagccaggccgacgccatcgtcgccagccagatcaagctgccgaagccgaagccgccggcggtggccgccatgcccaagcaggaaatgggcatccgtccggcccgcgccttgccctacgagctgggcgtgcatgcgcgctaccgcagcggcggagatgcgctgagcctgaccttcgccaacaccggcaaggccggcgcggtgttccaggtgttcgacctgctcgacagcgagaacccgccgaaacgctacaccgtcggcgcgcgcaagcgcctgcacgacagcttccagggcgacgccagcggcgactaccacctggaagtgcacggtccgaacggtttcctccgggtctttcgcggcaacctgcggcgcgacctggcggagcgcaaggcgccgctgccggaagtgcggatcgactacgagccgctgttcggcaacctgcgcgtgcaactgatcaaccgtggccgccatccggtcaagctgacggtcaaggacaacgtctatcgccagggcgagcggcgtaccgtcaacgtgccgccgggacagcgccgggaagtccgctattcgctgcgcagcagcggcaactggtacgacttcagcgtcagcgcgcagggggcggatagcttcctgcggcgtttcagcggtcgcatggaagatggtcgctccggcttcagcgacccgggcatgggcctgggcacgctgaccttctgacccggacggccgcgccggctccctgcaatggggcggccggcgcggacggcctgcgccctagtcgaggggaaccgggtagagggtattgaggatccacttgccgtccttcaggacgaaaccgtacgaaatctccttggccatgtacgtatcccagcgcgtgcagacgccctggccgtcggcctgcttgcaggagtaggcatcgatcttgcccatgtgcagcttctccagggaaaccacctggaacttgctgttgccgctgcaggccaccggattgtcgatgtatccgtactggcgccaggccgcgtcgtagttgcctctcgacttgaacagggtcttgtctttctgcgacgagccggacggcggcgtcatcccgtagatgtgctgggtcacgtggccgcccatcgaggtattgcgcgtggcgtcggcgctttgctgcacgctggtgatgtcgcggcaggcggcggcgttggccgaggaggccagcagcagaagggcggagaaacccaggccggcgacgcactggcgtgcgtcggggcggggcagtgaaaagcggttcatcggcggctcctgtgagatggattgcttatgaaggaacgccgccgcgcagttttcgtgaagatgcctcagtcgcgatagcgtggtggcggcgcgtagccgccgccgttccgggcgtcggcgggaaatgcctgcggtccgtcggccggcgcctcgcgaccgctggccggagcgtccagctcgaacagggccacgccgatcacgccgaggttgcggctgtcgccggccgcgctgttgctggcgtaggcatcgtcggggctggcgaagcggaacgccgcgacttcccgttcgttcttgcggaagccctcgatcaccaggctctcgcccggttccagcacatagccgcggttcttcaggctgcccggctggccgttgagcacgtccaggccgtctaccgtggagaccacctcgtaggtcgcgctgccgaggttgttcagccacagtcggtagcgctggccttcacgaccctgcaattgcagggtgctgcggtgctgcacgaggtcgaacttgccgccatcctcgtcgagtacggcgaagcccaccctgcccttggccaggggcagttccttgatggcacgtccatcgaagcggctcgcgctgtagaacacctggcggcgatcgaccggttgctccgatagacgtcgcagggccaccgaggtgaccggcgaggcgacgccttcgccccattgggtgccgagccgctgctcggtcggcgcgccggcctgctgttggggcaggctgcagccgccgagggccagcaggcccagcagtaatgcggatagcagtggtttgcgcatggttccttcctctccctggacaccaggaggcggggtgcctccctgatggctccgagcaccgatgatgcccgatcttcggcgggcttcgtaaatttcctcgaacgggcgcggcggcgcgttttcctattggctgacccagcgctgccgcgcccaggcgctcaggctgtcgaccccgagcaccaggaccagcatggccaggatcaccgtggcggcctgggcctgctggaacaggctcaggctgaaatagagcatctgcccgagcccgccggcaccgacgaagccgagcacgctggccatgcggatattgttctcccagcggtacagggtataggccaccagttgcggccagacccccggcagggtgccataggcgaatgccgcgaggcgtccgctgccggccaggcgcaaggcctcggcgggctgcgccggggtgttctccagggcttcggcgaacagccggccgagcacgccgccggtgtgcagcgccagggcgagggtcccggcgttcggcccgagcccggccgccagcaccatcagcgcgccccagaccagctccggcaccgcgcgcagcgcattgagcaggagtcgcgccaggctctgcgccggcacgccgaagcgacctgccgccggcagcgcgaagagcaggccgagcagcgccgccagcagggtgccgatggccgacatggccagggtttccagcagcccccggccaatcgcccgcaggtgcggagcggacaggtcgggcgggaagaactcgctggcgtaggcggccatctggcccagtcccttgccgctgaaaagacctgcggtgtccatgtccagataggcgaacgaggcgcccaccgcggccaccaccagcagcggccagagcagcaggcgccaggtccggctcatgccagcctcccgcgcaggaagcggctcagcaggtcggcgaggaggaccagcaggaggaaggtcagcaggatgctggcaacctcgccgccggcgaacatccgcagcgacaggtcgatctgctggccgaggccgccggcgccgacgaagcccatcaccaccgaagcacggatcgcgcactcccagcgatagacagtgtaggaaatcatttccccggcggcgttcggcagcaccccgtaggcgaacgccgccagccgcgatccgccgcccagcagcagggcgcgggtggggcgcggatccaccgactcgaagatttccgcgtagaccttgccgagcatgccggcataggtgatggcgatggccaacaccccggcggtggggcccaggcccacggcgcggacgaacagcagcgcccagacgatttccggcacgctgcgcaggaggatcagcaggccgcgcaccggccagcgcagtgcccgtgcccaccaggccggcaggccgccgcgcggcagtgccgagagcgacagggcgcgggtcgccagcagtgcggcgggaaacgccaggagccaggccagggccatgccggcggtggcgatggcgagggtttccagggtggcgcggccgagcagggcgaggaacccgggatcgtgtgccggcggccagaagccggcgaggaaaccgcccatggtgcgcgcgttgtcgccgctgaacaggccggggatatccagttcgctgaggcgcagccccggccagagcagcagcaacgcggccagggtcagcagcaggcgcggcagggcggcggggtcgcgcggcggagaagcggcgttcagcatcgtgggatgtgcaccacggcgggttcgccggccgggctggcgcgctcggcctgcagttgttcgttggcgtagagggcgtccagcgcggcgcggtcgacttcgccggcgggcaggtcgaaggcgatgcgtccggcgcgcagtccgatcacccgggggaagtgttgcagcgccaggtccaccgcgtgcaggctggccagcagggtgctgccgcgcgcggcggcctcgcggttgagcagggccagggtatggccggcgagcaccgggtccatggccgagaccggttcgtcggcgaggatcagctcggcgcgctggtagagcacccgggcgatgccgacccgctgcaactggccgccggaaagctggtcgcagcgctggaacagcttgtcgccgagatccaggcgttgcagtgcgtcgtgggcgccggtgcggtccagcggatagaccaggctgaccaggctcttccatagcggccactggccgaggcgcccggccagtaccgcgctgaccacccgctgccgtggcggcagcggcggtgcctggtggaccaggccgatgcgcgcgcgcaggcgttggcgggcggcggcggatagcgcccagggctcctcgccgagcagttcgacacggccgacgctgggccgccattggctggcgagcacccgcagcaggctggtcttgccggcgccggaaggtccgatcagggccacccgttcgccagcggccaggcgtaggcggatgtcggcaagggcgcgttggccgtcggcgtggaccaggtccacgccgtcgaggctcaggctcacttcagcaggccggcggcgcgtgcggactcctcgatgcccttgtagttgtccggattggtctcgatgaagcggctggcggcctgcaggtcgaggatctccttgtcggccggtttcgccgggtcgagggcgaggaaggcctgcttgatcttctcggccagggccgggtcgaggttgccgcgcacggtccagttgtagtcgtagtaggtcggcgtggtggcgaagaccttgaccttggcggtatcgaccttgccgctgtccaccagcttctgccagaccgaggcgttcagcacgccggcgtcgaccttgccggcctggacccaggctacggtggcgtcgtgggcgccggagtaggcgacgcgggagaagaactgctcggggacgatgccgtccttctgcatgaagtagcgcggcatcaggctgcccgaggtggaggagaccgagccgaaggcgaaggtcttgcccttcaggtcctgcagggatttcacctggggatcggccgtgatgaatttgctggtgaactgctggtcctgctcgcgctgcaccaggggaatggcgttgccggtcttcagccgcgcctggacgaaggtgaagccgcccagccaggccatgtccaggcggtcggcggccagcgcctcgaccaccccggcgtagtcggccaccgggacgaacttcaccggcatgccgagttgcttctccagataggcgccgagcggcttgaatttgcgcagtagctcggtgggcgcctcgtcggggatcgccgagaccttgagttctttcagggtttcggcgtgggcgagcgcggcggacagggacagggcgatgccggcggcgagcgccagggagcgtttcaacatgggagagttctccggttcaatggcggaaaaaacccggggagtatagtggtgcgcggcccgcttgggcagccgtcgcggcgttgctcgccggcgcctcgcgggtaatatggcgctccccgtgcccattcgctgcgtattggagttcgccatgtccgcttccctgccttcccttgccttcgccggtctcggcctgatgggcgtgcccatgtgccgccggctgctggccgccggctatccgctggcggtgtggaaccgttcgccgggcaaacgcgagttgctcgcggccgagggcgcgaaagccgtcgaggtcccggccgaactggccgccgacgcggaaatcctgatgctttgcctggccgataccgcggcggtgcgtgaagtggtgttcggcgccggcggcatcgtcgagaacgccaggcccgggcagttgctggtggatttctccagcgccgagccggccgccacccgcgagatggccgccgagctggaggcgcgctgcggcgtgcgctgggtcgacgcgccggtctccggcggcacgccgggcgcggaaagcggcagcctggcgatcatggccggcggacgcgcagcggatatcgaacgcctgcggccggtcctctcccggcttggccagcgcctgacgcgcatgggcgaggtgggcgccgggcaggtgaccaaggtctgcaaccagatgatcgttgcctgcaacaccctggtgatcgccgaagtggtggcgctggcggagcgggccggggtcgacgccagcctggtcgctccggcgctggcgggcggcttcgccgactcgaagccgttgcagatcctcgccccgcaaatggccgagagccgttacgagccggtcaagtggcacgtacggaccctgctcaaggatctcgataccgcggtgaagctgtcccgcgagcaaggcgcggccaccccgatgagcgggttggccgcgcagttgatgcgtctgcacggcagccagggctatctcgaacgcgatccggcgaccctggtggagcaataccggaccgccgtcgagtgaacctcaggcctggttcaggctgcgcagcggcggcgcggcgtcgaagcggtaggcgcggaggaactcttccagggccgccagcggcagcggccggctgaacaggtagccctgcaccagctcgcaatggttctcccgcaggaacgccagttgctgcggagtctccacgccctcggcgacgactttcagatggagcttctgggccatcgcgatgatcgcctgggcgatttccatgtcccgctgcgaggcggggatgtccatgatgaacgagcgatccaccttcagcgcgtccagcggcaggcgccgcaggtaggcgagcgacgaatagccggtgccgaagtcgtcgatcgacaggctgacgcccagctcgcggaggcgttcgagcagcgggatggtctggtcgatgttgtacatcagcgcgtcctcggtcacctccagttcgaggaagcacgccgccagcccggcctgctccagcgcatgacggacttcgtcgaccaggctggcccggccgagattgctggcgcagcagttgaccgccacccgcagccgttcgtggccggccaggtgcaggctgcgcaagtcgcggcaggcgcgtcgcagcacccagtcgtcgagctggtcgatcatgccgttggcttcggccaggccgatgaagcggtccggaccgagcaggccctgggtcggatggcgccagcgcaccaatgcctccaactggtgtacctcgccgtcggcgagggcgaggatcggctggtagtgcagctccagttggtcgtcgcgcagggcttggcgcagttcctcctccatctgcagttcctgggtcgcccgcaccagcagttgccggctgaagaactgcgcgttgttgcgcccgcaggccttggactggtgcagggccaggccggcgttcttcagcagctcctcgcactgctcgccgtcgttcgggtagaggctgacgccgacgctggcggtcatcaccagggtgcgcccgtccagggcgatgggttccttcatcttctgcatcaggcgttgcgagaggatgtgcgcctcgtggtcctgggtgaggtcggcgagcacgcagaactcgtcgccggcgaagcgcgccaccacgtctctatcgcgcaacacgctgcggatgcgttcggagacgatcttcagcagttggtcgccggagtcgtggccgagggaatcgttgatccgcttgaagtgatcgaggtcgaggaacatcaccgccaggcccttgcctctcaggcgacagttctccaggtgctggacgaacacttcgttgaatgccgtgcggttctgcaggccggtcaggctgtcgtagcgagccatctggcgcagcgaggcgtgggcgtggtcgagctggttgagcagggcgttgacccggctgttttcgctgagccggcgctcccgttgtttctccgaccatgcggcccagatgccgcaggcggcgatggcgctggcgagcactccggtgagccagcccaggcgcagcgagtcggcgctggcttgcagttccagcggcgtgccggcgggtacgctgagcaccagcgcggccatcccggtgaaatgcatggcggcgatggcgccggccagcagcaggctggcgatcagtttcatgtagcggtagcgcgcgctgcgccggccgcgcaggtaggggaccgcggcgagggcggtgaaggcggcgccgatggcgatcagtaccgaaagggcgaacagcgatggctggtagtactgggtggccaccgagcgcatcgccgccatcccggtgtagtgcatggcagcgatgcccaggccgatgcagcaggcggcgagcaggcagggcagcaggccgaagcgcgggcgggcggtcatgtacatcgccaggtacgaggcggcgacggcgatcagcagcgacaggccggtgatcggcaggtcgtagcgcagggcgatcggcgcgtggaacgcgagcatggcgacgaaatgcgtggcccagatgccgctgcccaggcagaacgccccgatccattgccagaggcgcgggtggctcaggctgttgccgaccctctcgaccatgtccagtgccgtgtacccggcgaggcaggcgacgaggaaggcgagcgccaccagcgacggcgaataggtgcagttctgcagcacgtagccgtcgacgggagactctccgaggaagcgcaggccttgccaatccatagcggtgtctccctggacacggaaaacccgcggacggcgcgggtgcgggctgggggtggcattgtgcttccagtatagatagcgggagccacctgcaaggtcggcatggaaggaagtcgctggccgccgacatacggccggtttcggcattttcccggggagaaaaggcatagctgagcttgttccggctccatcgccacgggcatgatcgctgcgcccgcgagggctcgcgaggcttcacgaaattttgaccaggcgcccgatagagttcgggcgccccgccacggggggtggcggcggtccgttacgtttcaggagttgcttcaatgggtgggggtatcaagcgtttcttgccggctatcggttcgacccggctggtgatgctgttcgcgctggttctggtggtgttctacaacgcggcgacctggaaggccctgcatggcctggtgccgctgcaaggcttgaagggcttcgcgttcttcgcctcgttcgcggcgttcctgtgggccgccttcacgctcctgctgaccctggtttccttccgcccgctgctcaagccggccttgaccctggtcgccctgtgctcggccggcgcgacctacttcatgggcagctacggcatcagcatcgacacggtgatggtgcagaacgtcttcgagaccaacgccaccgaggccggcgacctggtcaacccgaccctgctcggctatctgctgttgctcggtgtcctgccttcgctgctgatctggctctggccggtacgctaccggccgttcttccgcggcctgctgaacaagatcctgacgctgctcggctgcctgctgatcgtcgcggtaatggtaggcagcttctattccacctacgccccgatcttccgcgaggaagacaagctgacccacttcatcaacccgaccaactacatctacgcggtgggcaagtacgccaagcagcgcctggtgatcaaggaacacctggtggtcgagccgatcggcctggacgcccgccaggcgccggctgcgctgcagcgacagaagaaatcgctgctggtgttcgtggtcggcgagaccgcccgtgccgaccatttctcgctgaacggctacgcccgcgagaccaacccggagctgagcaagcaggacatcgtcaacttcacccaggtccgttcctgcggcacttccaccgcggtctcggtgccctgcatgttctcccagtacccgcgcgaggactacagcgacaagaaggccaagacccacgaaggcctgctggacattctccagcgtgccggcgtgcaggtactgtggctggagaacaacagcgactgcaagggcacctgcctgcgggtgcccaaccgggacatcccgaagacccagccgagtccgttctgcgacggcaagaactgcctggacgagtcgctgctggtaggcctgcaggagtacatcgacgggctgcaggacgacgccatcatcgtcctgcactccgatggcagccacggtcccgagtactacgagcgctacccgaaggagatggagcgcttccagccggtatgccggaccaaccagctcggcagttgcagcaaggaagagctggtgaacgtctacgacaacaccatcctctataccgaccacttcctgacgaaggtgatcgaattgctcaagcggaatgccgacaagcgcgatacggcgatgatctacgtgtccgaccacggcgagtcgctgggcgagaatggcgtctacctgcacgcggcgccctattcgatcgcgccccaggcgcagatccacgtgccgatggtcatgtggttcgccccgcaggcgctgggcaactggggcatccagcgcagttgcctggacggcaagcgcgacgacaaggacctgagccacgacaacctgttccactcggtgctcggcctgctggacgtacagacttcgctgtaccagccggcgctggacatcttcgccagttgccgcgcgcccagggcagcccagtgagcgacgggggctgaaagaaaaaaggccgtggaggattccccccacggcctttttcgtcggctttcgccttatttgtcgcggaccagcaggaccggacgcgaagccacgcggatcaggccttccgccacgctgccgagcatcaggcggcgcatgccgcgacgaccatgggtgcccatgaccaccacgtcggcatcgctggcctgggcctcgagctcgatgcgctcggcgatttcctcgctggcgcgctcctggcagacgcgatcgaaggtggcgccttcgacgttgctcgcctcgaccttctcgcgggccttggccaggacgtcatcggcggctttcagcgcggcttcgcgcagcggctcggggttgtagtacaccgcgtagtcgggaaggtggcgcagcgggctgtcgacgatggtgatgacgcgcagcttgccgccgctgaggccggccagcttgatggcctcttccagggcgcggtcggagaccgggctgccgtccacggctaccagaatgcgatcgtacataaggtgtccctccagagtgagtgtccgcccgccgggcgttcttgaaacttcaaggacactgtagaccctcgcggccggcggacctttgccggaggtcaataagtcgcagggcgaccgtcgcgattccgctgcgacgcctggctcgcggcccggcgggggccggggaacggggcgaacggtcgccgcgcggccattcgccgttgtggccttcgctggaaatgaaatgaaagaagccatgggggatgcccatggcttctcgtttcgcgcagccgttgccgggcgtcagccggcgaccaggatgcggatcgcctcgaggcgcagggaggccttgtcgagcagggccaggccttcctcgcgctgggtgcgcaggctgtccagctcgctgtcgcggacgctcgggttgaccgccttgagcgcggtcaggcgcgccagttcctcgtccatggcggcggcgaactgctgcttggccctggccacgcgttcctcgtggcgcgggacgatcttgccctcggccacgtcgaactgcttggccagcacatcgcgctgggcctggacgaacttgttggcgctgacccgtggcacgctttccaactggtcgttgagggtttccagggatacccggccggccaggtcgttgccgttggcgtcgagcaggcagcgcagggcctgcggcggcagccagcggccgagctggagggcgcgcggtgccacggcctcgctgacgaacaggagttcgagcagcacggtgccaggcttcagcgccttgttcttgatcagcgccaccgaggtgttgcccatcgagccggacagcaccaggtccatgccgccctgaaccatcggatgttcccaggtgaggaactgcatgtcctcgcgggccagcgcctgggcacggtcgtaggtgatggtcacgccttcgtcgtcgccgagggggaagccggcgtcgagcatcttctcgcttggcttgaggatcagggcattttccgaatggtcttcgctgtggatgccgtaggcgtcgaacaggcgctccatgtaaatcggcagggcgaagtcgtcgtcctgttcctcgatggcctccaccagcgcctcgccttcgccggcgccgccggagttcagctcgagcaggcggtcgcgaccgctgtgcagctccgcttcgagggcttcgcgacgggcgcggccttcggcgagcagcgcgtcccaggccttgtcctcgccgccgtcgagcagcggcagcaggcgcgggccgaactcgtgttgcagggcgttgccggtggggcaggtattgaggaaggcgttcagcgcctggtggtaccactggaacaggcgctgctgggcgctgttctccaggtgcggtacgtgcaactggatggtgtgtcgctggccgatccggtcgaggcggccgatgcgctgctcgagcaggtccgggtgggccggcaggtcgaacagcaccaagtggtgggcgaactggaagttgcggccttcgctgccgatttccgagcagatcagcacctgggcgccgaactcttcgtcggcgaagtaggcggcggcgcggtcgcgctcgagaatgctcatgccttcgtggaacaccgtggcggagatgcccgaacgcaggcgcagggcgtcttccaggtcgagggccgtctcggcgtgggcacagatgaccaggaccttgaactgcttgagcatcttcagggtatcgatcagccactcgacgcgcgggtcgaagcgccaccagcggttgttgtcgtcgccgtcttcccactgctgctggaaattcacttccggatacaggtccgggtgttcgccggccggcaattcctcgtactggctcggcatcggcaacggataggcgtgcagttcgcgctgggggaagccctgcacggcggcacgggtgttgcggaacagcacgcgaccggtgccgtggcggtcgagcagctcgcggaccaggcgcgagcgagcttcttcatcgccgccctcgacgctggccagcagctcgtcgccctcgctgccgaggaagccgtggatggccttgcgcgcgccggcggaaagactgccgtggtcgagcagttcctgcaccgcttcggcgaccggacgatattgctcgctctcccggcggaacgcttcgaggtcgtggaaacgattcggatcgagcaggcgcaggcgcgcgaagtggctgtcctggccgagttgctccggggtcgcggtgagcaacaggacgccgggaatgatctccgccagttgctcgaccagcgcgtattcggcgctgacctggtcctggtgccagaccaggtggtgggcttcgtcgaccaccagcaggtcccagccggcggcgaacagggcgtcctgggcgcgttcgtcttccttcagccactccagggcgaccagggccaactgggtgtcctcgaagggattgctggcatcgctttcggcgaagcgctccttgtcgaacagggccacctgcaggttgaagcgccggcgcatctccaccaaccactggtgctggaggttttccgggaccaggatcagcacccgcccggcgcggccggagagcaactggcgatggatgatcaggccggcctcgatggtcttgcccaggcccacttcgtcggccagcaggacgcgcggcgccatgcggtcggcgacttcgcgggcgatgtgcaactggtgggcgatcggctgggcgcgggcgccgccgaggccccagagcgaggactggagcagttggctgcggcgttcgagagtgtggtagcgcagggagaaccagggcaggggatcgatctgtccggcgaacagacggtcgctggcgaggcggaactggatgaagttggagagctgggtttccggcagggtgcactgctcgttctgcgcggtgaggccgtggtacaccaataggccctcgctttcctcgacctcgcgaacggtcatcttccagccttcgaagtgcgtcacttcatcgccgggggcgaagcgcacgcgggtcagcggcgcattgcgcaaggcgtattggcgggtatcgccggtcgccggatagagcacggtgagcaggcggccatcctgggccaggatggtccccaggcccaattccgcttcactgtcgctgatccagcgttgccccggttgatactgcgccatgtccacctcccaaaaaagccgggtatggtaccgcaacgcgtggcgttgagcgacgcttggcgatggattgcgtgttgcgccacggcttcgtcggagagccgtccgtcggtacgggagcgaccgcctggcggctgtttctcaagtcgagcggcgggtcgaccgataacccttgtagaagaacgccgcaaaccggcacgctgcgagaacccatgacgcggcactacccagagaggttgcctgcatgcttccgccgatcccccagggcctgatcccggtcaccgtccagcaggacccgcccaagccccgtccggccacgccgccggtcgcgccgacccaggctggcgcgggcagcgatggcgtcgccttgcgccaggagcgcgacgaggaaagctggctggaagaggaataccgccgtcgccagcgccgccagggcggcgaggcgcacgcgcggagcgacgagggggacgaggcgccggctgacgaggcgggggagagcgcccaggcggacgagctgccgcgcaagggacaattgatcgacatcgaagtgtaaccctggttttccaggcttcagcagcggccttgcggcgtagtaacctgcggcccatggacctgttcgccgacgcacccctgaccctgccggacgccgacctgcgctatctcccgcattggctggatgcgccgctggcgagcgcctggctgttgcgcctggaacaggaaacgccctgggaacagccgatcctgcgcatccatggcgaggagcatccgaccccgcgcctggtggcctggtacggcgaccctgacgccgcctaccgttattccggccaggtccaccggccgctgccatggaccgcgttgctcggcgagatccgcgagcgcgtggagcgcgaggtcggccagcgggtcaacggcgtgctgctgaactactaccgcgacggccaggactccatgggctggcacagcgacgacgagccagagctgcgccgcgatccgctggtcgcctcgctcagtctcggcggcagccgccgcttcgacctgcggcgcaagggccagacccgcatcgcccactctctggaactgacccatggcagcctgctggtcatgcgcggcgcaacccagcatcattggcaacatcaggtggcgaagacccgccgctcctgcatgccccgtttgaacctgaccttccgcctggtgtacccccagccatgaacgacgacgacaaggtgatcgacctcagcgccgagcgcgacaagcgcatccacgacgtgcacgagaagcgcctgcaggaggtccgcaaggccttcgaacaggtgttgccgctgggcaagccgcggaagaagccgaaaggcaagccgaagaagcgctgaagcctccgccgccgcgttcgccggcggcgcattcctgcgggcaacgtgcggcgatcgggcaggtttttcccggttatctgcggcgtccgaccgcattctccctcctgcgaaacttgacctgggtcagtgtcatgcacctggccgaaaaagcccgtccgggcgattgatccaggtcaatgttgcgccgccgcgcctcgctaatctgagcccatcgagcaacacccaaccggcaactggaggccatcaacatgttcatcgacgaagtggttctcgcagggattcttacagtaggcctcatggtcgctttcttcggtggggtcggttacttcatctggaaggattcccatagccgcaaaggctgatcctcccggatacacagagcacgcaaggcacttagggcgacttcggtcgcccgttttttttgcgcctggaaaaacaccggcgcagcgatcgggatactacgaatgtcgctggacgatattgttagcagcctaataatataggctgcacatatcgcctcggcgttcgccggctatctatgctgatgtagaccccgtttcggaagaccctgtgcccattcactggaagccgttcctggcaccctcgacgctggcgctcaagttcgccatcaagacgctcctggccggcggcctggcgttgtggtgcgcctttcgcttcgacctggagcagccgcaatgggcgctgatgaccgtgctgatcgtgtcccagccgttgtccggcatggtggtggcgaagggcttgttccgcctgctcggcaccctggtcggcaccgcgatgtcggtgctgatgatcgcgctgttcgcccaggcgccctggttgttcctgctggccatctcgctctggctggggctctgcacggcggcctcgacctccctgcgcaaccacgtttcctatgccttcgtactttccggctatacggtggcgatcattggcctgccggcggtggaccagccgctgctggtcttcgagcaggcggtggcgcgttgtaccgagatctgcctggggatcatctgcgcctcggcggtcagtgcgatcctctggccgcagcgggtcgagcagaacctcgacaagcaggcccacgccacctggctgctgggcatgcaggccgcgcgcggcgagatcgacccgcgccagcggcagccgcaggggctgctcaacgcgctgagcaagattgtcgaggtcgatgcgcagcgcgaccatgcctggttcgaaggcgagcgcgggcggcgccgggccggcgccctggcgttgctctcgcgcgacctgctcagcctgttgcgcaccgcgcgcggcgtggcccggcaacgggcgcggctgagcgaagaggaagagcgccgggtggagcgctggctggccgcgctggccagcgccctggaaggaaccgatccggcgtcgatgcaggcgctgcgcgaggagttggcgcaggtcgcggtcgagccgcagtggagcaacgaccagcggtacctgctgacccgctgctcggtgctgctgctcaaggcggtgaatgccgagaagggcatgcgcgcggtggccagcggcgaggtcgaggggcgggtgggcagcgccggtaccctgtcctggcaccgcgacctgcagatggcgctgttctacggtacgcgtagcgccctggcgttgctcgggctgtcggtctactggatctataccgcgtggccggcggcgtccggcgcgatgctgctggcggcggtggtgtgcagcctgttcgccaaccgcgacaacgcggtggccatcggcctgagcttcctgcgcggcatcgtctacgcgatcccggcggcgatgctggtcagccagtggctgctgccgcagtggaatggcttcccgctgctctgcctggcgatgggcgtgccgctgttcttcgccaccctgggcatggccgtaccggttaccgccggcaccgccacctcgttcgcgatccacttcatcgtcctggtcgcgccgcgcaaccagatggactacaacctcgcgaccctgctgaattccgcccagggcgtgctgatcggagtcggcttcgcggtggtgatcttccgcttgctgaccttgcgtccgggctggctgacccgacgcctgctggacgccacctgcgtcgatctcggccgcctcacccggcgcccgctggcgcaggcggagaactggttcggcgggcgcatggccgaccgcctgttgcgcctggcgcggcacgccaacctgttgccggagcaggagcggcggcgttgggacgatggcctcctggcgctcgacctgggtaacgaactgatccacctgcgggcctgcctggaaggcgcccgtggcgtcctgcgcaaggcgcgcgaccgcttcctcggggaactgggcgaactgcttgaggccggtcccgcgggtccgcgcagtgaccgcctggagcggatcagcctgccgttgcgcgaagccctggagcgtgacgctcgccacgacgacgaagccagccgcctggcgcgcgcggccctggcgcaactgctgttcacctggcagcagtggtgccatcaggaggaaagccatgagtctgcatgaatcggcctggggcggcgtctacctcagcccgctgttcgtctatgccctgctggcgctggcggccaccgccgcgctgcgggtgctgatccagaaaacgccgttgcgtcgctgggtctggcacgaggcgctgttcgactgcgccctgttcattttgatgttgagtggcattacctgggcggctacgacctgaatcgtcgccccgagaaggagattcgcatgcgtgcatcgcttcgcgtcgtcgtcaccctgctggtggtcgctgccgctgtcctcgccggcatctggctctggcgctactacatgctctcgccctggacccgcgatgcccgggtgcgggccgacgtggtggtggtggcgccggacgtgtccggctgggtgaccgacctggaggtcaaggacaaccaggtggtcaaggtcggcgacgtgctgatgcgcatcgaccaggaacgctaccaggccaacctggagcaggcccgcgccgtcgccgagacccgtcaccagcaatacctgttgcgccagaacgaggcggcccggcgcagccgcctgggcatcggcgcgatcagcgccgaggacaaggaaaacgcccagatcaatgccgccatcgctcgcagcgagtaccaggaggcgctggcccaggtgaagatcgccgaactcaacctcaagcgcagcgagctgcgcgccgcgcgcaacggccaggtgaccaacctgcgcctggcccagggcaactacgccacggcgggccaggcggtgatggcgttggtcgaccagcagtccttctatgtggtcgcctacttcgaggaaaccaagctgcccggcatccgcgtcggcatgcgcgcccaggtccgcctgatgagcggcgatcagccgatcgacggcacggtggagagcatcagcagcggtatcaccgaccgcaactcgacgccggacggccagttgctggccaatgtcgagccgaccttcaactgggtgcgcctggcgcagcgcattccggtgcgcatccgcctcgaccaggtgccggcggatgtccacctgagcgccgggatgaccgccagcgtcaccgtgcagggggactgaacggcagcgcttgcgtggcgccatccagcgtgctggcgccaagcgcgcaggccagcgccgccagcaccagggcgaggccgacccagggcgtcgcggcgactcccagtgccgccaccaccaggccgcccagcgccgcgccgaggcccacgcccaggtgcatggccgaggtgttcagggcgacgccggcggaaccgctggccggatcgctgcgcagcaggaagctctgcaccaccggcgagatcatccagctgatcgcgctccagaccatcagtaccggcaggaacccgatgctgcccaggctcagcggcaccgccgccagcgccagggcgaaggccgccggtaccagacgcagggcgcgccggtggccgaggcggtcggccagccagccgccgatatagccgccgctcagcgctgccaggccgatcagcaggaggatcaggctgatctcgctgggcgagcgaataccggccatgctcgccaggtacggggtgaaataggcgaacagggtgaagtgcccgccgagcaacaggatcgataccagttgcgcgagccacagcgcgggctggcgcaactgccgcaggtagccttcgcggccgggcaggtcgccggcctggcgttgcggcaggtagcgccagagcagcaggcacaagggcagcgaatagaccgcgatgccggcgaagatccagcgccagccgaaccagtcgctgatctgtacgcccagtggcacgccgaacaccagcgaaccgctgatgcccatgaagatcaggccgatcgcccggccgcgctgggccggggcggccagctcggcggcgagcaggctggcgaggacgatcagcagcccgcaacaggccgacattcccaggcgagccaggagcaggccgagatagcccggagcgagggcggcgagcgcgttgctgagggcgaacagcagcagggtcgccagcagcaggcggcggcgttcgatgcgccgggtcagccagccgagcagcggtgcggcgagggcgaagccgagggagaacagggtggtgagctggccggccaggctgatggagacccgcaggtcttcggccaggggcggcaggatgccgatcaggatgctttccgccaggccggcggcgaaggtggtcagggatagcaacagcaagcgaaggtccatggcggctccgattcccggtaaggggtttcgggcggtggaatgccttcggttatccctggtgattgaggtaagacagcggacagggtagagcagcgcgcggcggcccggcaagtccgccgggccggatggcccgacggcagggaaggctgctcagccgatgctgatcggcggcagttcggccagctcgacgctgagcttctcttccggcgccatgatctccgcttcgccgtcgaccacctgcttgcctgcctggttgaacacccgcgtggccatgcgcacgcggttcttcggcagcttctcgaggacttccagttcgaccttcaggtcgtcgccgagcttgaccggacgggtgaagcgcagggtctggccgagatagatggtgcctggaccgggcagcacggtggcgatcgccgcgctgatcagggcgccgctgagcatgccgtgggcgatgcgttccttgaactgggtggtggccgcgtaggcggcgtccagatgcaccgggttgcggtcgccggagactgcggcgaacaactgcaggtcgcgctcggcgatgctgctggtgtactcggccttttgcccgacctctagctcggcgtagggaatgttctggacctggctcatgttctctcctttgtcgaatgatcccggcggtggcgcagggcctgttccagccagtcgatcaggtcttgggtgaccgcgtcgcggttgctctcgttgaacagctcgtgacgggcctcgggataggtcttcagggtcacctggcgcagcccggcgccgcgcagggcgtcggccaggtcgcccaggcgcctgccctggctgaccgggtcgcgttcgcctccgatgaccagcagcggcaggccggcatcgatctgccgcaggtgggtgggcggggtgatatcggccaggccgccgagcaggtccatccacaactggttgctgcagcggaagccgcacagcgggtcggccacgtacctgtcgacttcctgcggatcgcgactgagccagtcgaaggccgtgcgattgggcttgaacgccttgttgaacgagccgaacgagaggaagtcgatcagcgcgctcttgcccagcggcccctggcgccagcgctcgaagcgggcgatcaggcgggcgatccggtagagcgcttgcggctggtagttggaaccggaaaggatcgccccttgcaggctgcagctgtggtgcagcaggtaggccatggagatgtagctgcccatgctgtggcccagcaggaagatcggcagttccgggtgctgctggcggatatggtggttcaggctggccaggtcgccgaccaccttgccccagccgccctggtcggcgaagtggcccagctcgtcggcttcggcggtccggccgtggccgcgctggtcgatcgcatagaagtggtagccggcagcgttcagcgcggcggcgagacgctcgtagcgaccggcgtgctcggccatgccgtgggacagcatcaccgcgccgacggccgttgcgctcggccagtggcgggtgtacagcggggtttcgtcgctggcggggagccagtaggcagcggcgggcatgttcgttccttgtgccgggcggacgcgttccggcgcattctagcagcgtacgcggcttcgtcccggaaaagcgccacccttgggcacgggccgctctggaatggcgggcggcgaagagcgacaggctggagattcacactatcaataagggcaggaggagtatttgcgctgtccgacgcaactgctaagttgcccgatgccccgcacatgcgggccagacccgctcaggtaagaggacaagaataaatgcaacctgaattctggaacgacaaacgcccggccggcgtacccgacagtctcgacttcgccgcctaccgttccgtggtcgaggtcttcgagcgctcctgcaagaaattcgccgaccgcccggccttcagcaatctcggcgtgacgctcagctacgccgaactcgatcgtctgtccgccgccttcgccgcctacctgcagaaacagaccgatctccagcccggcgaccgcatcgcggtgcagatgcccaatgtcctgcaatatcccatcgcggtgttcggcgccttgcgcgcggggctggtggtggtcaacaccaatccgctgtacaccgcccgcgaaatgcgccaccagttcaaggacgccggcgtgcgtgcgctggtctatctgaacgtgttcggcaagctggtcgaggaagtgctcccggatacgcggatcgagtacctgatcgaggcgcgcatgggcgacctgttgccggcgctgaagggctggctggtgaacagcgtggtgaagtcggtgaagaagatggtccccgattatcgcttgccccaggcgctgccgttcaggcaggccttgaagcaaggccagggccatgccctgcagccggtcagggtcggcctggaggatgtcgccgtgttgcagtacaccggcggcaccaccggggtctcgaagggggcgatgctcacccacggcaacctggtggcgaacatgctgcaggtccacgcccagctttcccagctcggcaaggatggcctgccgctgatgaaggaggcgcaggaggtgatgatcgcgccgctgccgctctaccacatctatgccttcaccgcgaactgcatgtgcatgatggtcagcggcaaccataacgtgctgatcaccaacccgcgcgacatccccggtttcgtcaaggaactgaagaagtggcgtttctccgcgctgctcggcctcaacaccctgttcgtcgcgctgatggagcaccccgggttcaaggacgtcgatttctccaacctgaagctcaccaactccggcggcaccgcactggtcagcgccaccgccgagcgctggaagggcgtcaccggctgcaccgtggtggaaggctatggcctcaccgaatgctcgccggtggtgaccaccaacccctacggcgagcaggcacgcctgggtacggtggggataccggtcgtgggcacggcgctcaaggtgatcgacgagcagggcaacgagctgcctgtcggcgaacgtggcgaactctgcgtgaaaggtccgcaagtgatgaaggggtactggcagcgtcccgaggccaccgaggagattctcgatgccgaaggctggctgaagaccggcgacatcgcggtgatcgacgaggacggcttcgtgcgcatcgtcgatcgaaagaaggacctgatcctggtctccggcttcaatgtctaccccaacgagatcgaagacgtggtgatggcccatccgaaggtggccagttgcgcggcggtgggcattcccgacgagaagtccggcgaggcggtgaagctgttcgtggtggcccgcgaccccagcctgtcggtcgaggaactcaaggcctactgcaaggaaaacctcaccggatacaaaattccgcgacagattgtgctcaaggatgcattaccgatgacgcctgtgggtaaaatcctccgtcgtgagctgcgcgaaatcgcctgatagccttacaaggctctgaaacgggcatttgccggggacaggaaagaccgtgaccgagactaatgtctcggtcatttttttgaccgaataggtcatgtttggtgctggtctgcctctggcaaagctgataatctcggcgcgcctaatagccctgggtccagggttagcgagcagatcacaacaagatgccgccatgagcggtgaagattagctgttgcttaggagtgggcttccatgatcgaaaacttctggaaggacaagtacccagcgggtattgctgccgagatcaatcccgaccagtacccgaacatcctgtcggtactgaaggagtcctgccaacgttttgccaccaagcccgcgttcaccaacctgggcaagaccctgacctacggcgagctgtacaagctgtccggcgacttcgccgcctacctgcagcagcacaccgatctcaagcccggcgaccgcatcgccgtccagttgcccaacgtcctgcaatacccgatcgtggtcttcggcgccatgcgcgccggcctcatcgtggtcaacaccaacccgctgtacaccgcgcgcgaactggaacaccagttcaacgactccggcgccaaggcggtggtctgcctggccaacatggcccacctggtcgagggcgtactgccgaagaccggcgtcaagcaggtgatcgtcaccgaagtcggcgacatcctgccgccgctgaagcgcttcatcgtcaacttcgtggtcaagcacatcaagaagatggtgccggcctacagcctgccgcaagccaccaagctgaccgacgcgctggccaggggcgccggcaagtcgttccaggaagccgcgccgcaggccgacgacgtcgccgtgctgcaatacaccggcggcaccaccggggtcgccaagggcgccatgctgacccaccgcaacctggtggccaacatgttgcagtgcaaggcgctgatgggcgccaacctcaacgagggctgcgagatcctcatcgcgccgctgccgctgtaccacatctatgccttcaccttccattgcatggcgatgatgctcaccggcaaccacaacatcctgatcaccaaccctcgcgacctgccgtcgatgctcaaggacctcggccagtggaagttcaccggctttgtcggcctgaacaccctgttcgtcgccctgtgcaacaacgaaaccttccgcaagctggacttctccgcgctgaagctgaccctctccggcggcatggcgctgcaactggccaccgcggagcgctggaaggaagtcaccggctgcgccatctgcgaaggctacggcatgaccgagaccgcgccggtggtatcggtcaacccgttccagaacatccaggtcggcaccatcggtatcccggtgccctcgaccctgtgcaaggtgattggcgacgacggccaggaagtgcccctgggcgagcgcggcgaactctgcgtgaagggtccgcaggtgatgaagggctactggcagcgccaggaggccaccgacgagatcctcgacgccgatggttggctgaagaccggcgatatcgccatcatccaggaagacggctacatgcgcatcgtcgaccggaagaaggacatgatcctggtctccggcttcaatgtgtatccgaacgaactggaagacgtgctggcgaccctgccgggcgtcctgcagtgcgccgcgatcggcatccccgacgagaagtccggcgagtcgatcaaggtcttcgtggtggtcaagccgggggcgaccctgaccaaggaacaggtcatgcagcacatgcatgacaacctgaccggctacaagcggccgaaggccgtggagttccgcgacagcctgccgaccaccaacgtcggcaagatcctgcgccgcgaactgcgcgacgaagagctgaagaaagcgggccagaagtaagtccgccgttgcctgaagaagccccgccgatgcggggcttcttcgttgcaggcagtcggttgcggggtgagcgggcctgtgcggacgtgccggcagcgcatcacctgccggaggaaccccccatggcccgcctcgatcctgccctggccgaagaaatacgccgtctgccgatcagccggcgtctggaactgacccaggcattgctgcatcgcgccggccccgaggtggagcgccaatggccgccagtggccgaggatcgcctcgccgactgccgggcgggcaccgccgatgcgctgccgctggccgagatgctcaagcgactggggcgctgagagggccatcgcccaccagcagcgtcggccgtatcgcggcagcgagcgttaaccgggattcgtcctcttccgctcaaatctgcgacaattccgaatatttttcgcctcggcagtggccggagcttcttcccgtcctccgcgactgcggcacgctcacagcattcgaaaagcctagatgaccgaccagactccttccctcgaccaactcgtccggcgcctcgaccaggcccagatcagcgaccgccaccgcttgcgccggcagctccacgaactgcgcaagcagcccgacgacgcgcgcctggcgcagtgggtcgagcgcttccaggcctcctgcgccaaggtcgaggcgcggcgcgccagcgtgccggcgatccgctacgacgacagcctgccgatcgccgccaagcgcgacgagatcaaggccgccatcgccgcccaccaggtggtggtgatcgccggcgagaccggctcgggcaagaccacccagttgccgaagatctgcctggagctggggcgcggcatccacggcctgatcggccatacccagccgcgtcggctggcggcgcgcagcgtggcgacgcgggtcgcggaagagattggtacgccgctgggcgcgctggtcggctaccaggtgcgcttcgaggaccagagcgacgacagcaccctggtcaagctgatgaccgacggcatcctcctggccgagacccagcacgaccgctacctggagcgctacgacacgctgatcgtcgacgaagcccacgagcgcagcctgaacatcgacttcctcctcggctacctgaagaccctgttgcaccggcgtccggacctgaagctgatcatcacctcggcgaccatcgacctggagcgtttctcccggcatttcgacggcgccccggtgatcgaggtttccggccgcacctatccggtggagacctggtaccggccgctggcggcggaaaccgacgaggagggcaaccgggtcgaggacgacctgtcggtggaccagggcatcctcgccgccctcgacgagatcgccgcccacgaacgcgaggtcggcaagcggcccggcgacgtgctggtgttcctccccggcgagcgggagatccgcgacgccgcggagatgctgcgcaaggccaacctgcgccacaccgaggtgctgccgctgtacgcgcgactgaccccggccgagcagcagaagatcttccagccgcgcccgggacgcaagatcgtgctgtccaccaacgtcgcggaaacctcgctgacggtgccgggcatccgttacgtgatcgacagcggcaccgcgcggatcagccgctacagctaccgcgccaaggtccagcggctgcccatcgaggcggtgtcgcaggccagcgccaaccagcgcaagggccgttgcggacgggtcgagccgggcatatgcgtgcgtctctacagcgaggaggacttcaacgcgcgtccggccttcaccgacccggaaatcctccgcaccaacctggccgcggtgatcctgcagatgctgcacctgcgcctcggcgacatcgaggcgttccccttcatcgagccgccggacggcaaggcgatcaaggacggcttcacccttctgcaggaactgtcggcggtcaaccgcgaaggccagctgaccccgctggggcgccaactggcgcgcctgccgatcgacccgaggctgggccgcatgctgctggaggcggcccagcagggtagcctcgaggaagtgttgacggtggccagtgcgctgtccgtgcaggacccgcgcgagcgtccggtggagcggcagcaggccgccgaccaggcgcacgcgcaatggaaggacccggattccgacttcgccgcgctgatcaatctctggcgtggcttcgaggagcagcgccaggcgctgggttccaatgccctgcgcagctggtgccggaagaacttcctcaactacctgcgcctgcgtgagtggcgcgacgcccaccgccaactgaccctgatctgccgcgaactgaagctgccgttcgggcgtccggccaaggccgaggcgcgcaagccggaggcgaagaaaggcgcgtcggccgacaacgaacgcgaggtaccggggatcgattacgcggcggtccacaaagcgatcctgtccggcctgctcagccagatcgggcagaaggccgaggaaggcgactacctcggcgctcgccagcgacgtttctggatccatccgtccagcggcatcgctcgcaagcgcccgcaatggatcatggccgcggaactggtggagaccaccaagctgttcgcccgaatggtcgcgaagatcgagccggactggctggagccgctggctgggcacctgatcaagaccaaccacttcgagccgcactgggagaagcgtcgcggccaggtggtggcgttcgagcaggtcaccctctacggcctcatcgtcatcggtcgacgtccggtgcactacggtccgatcgacccgccggtggcgcgcgagctgttcatccgcgaaggcctggtgcgcggcgagatcaacagccgcgccaagtgcctgagcgccaaccggcagttgctggaaaagctcgacgagctggaagccaaggcacgccggcgcgacatcctggccgacgaggaaaccctgttcgcctattacgacgcgcgcctgccggcggatatctaccagaccgccagtttcgagaaatggtacgcccgcgagcggcagaaccagccggacctgctgctgatgcgcgaggaagacgtgctggcccgcgaagccagcgaagtcactgcggcgcagtacccggatcgcctgcgcctgggcgacctgcacctgtcgctgagctaccagttcgagcccggcaccgcgcgcgacggcgtcaccgtgcgggtaccggcgccgctgctgccgcaattgccggccgaacgcatcgactggctggtgcccggcctgctctacgacaaggcggtggcgttggtgcgcaacctgccgaaggcgatccgcaagagcttcgtgccggtaccggacttcgtccgcgccgccctggagcgcatcaccttcggcgaaggttcgctgccgcaggtgctgggccgcgagcttcagcgcatgaccggcgtgcgggtagccgacgaggcctgggccgaggcggcgacgcagttggacgatcacctgcggatgaacattgaggtggtcgacgcccagggcaagttcctcggcgagggccgcgacctggccgaactcaccgcgcgtttcgccgaagccagccaggcggccctggcgattccccaggccgacaaggaacagcagcgtccggtggaggccaaggccttcgccagcgtcgccgagaaggcccagcagaaggtcgccggattgtcgatgacggtatacccggcgctggtggaggagcagggcgaggtcaaggaagggcgcttcccgacccaggccgaggccgactaccaacaccgccgcgccctgcaacgactgctgttgcagcaactggccgagccggccaagtacctgcgcgccaagctgccggggcagaccgagatgggcctgctgtaccgcgagctgggacgggtcgaggcgctggtcgaggacatcctcctggccagtctcgacagttgcgtgctgcagggcgaaagcctgccgcgcgacggcgccgccctggccgcgctggccgagcgcaagcgcgctgcctggaacgagcacgccgagcgcctggcacgcctggtgctggatatcctcaagctctggcacggcctgcagaagcgcttcaagggcaaggtcgagctggccatgaccgtgccgctgaacgacgtcaagggccaactggccaacctggtgtatccggggttcgtccgcgccaccccgctggagtggttgaaggagtatccgcgttacctcaaggccatcgagcagcgcctggacaaggtcgccggccaggtccagcgcgaccgggtgtggagcggcgagctgggcgaactctgggcgcaataccaggcgcgcctcgccaagcacgcccaggaaggcaagcgcgacgccgagttgcaggtgtatcgctggatgctggaggagtaccgggtctcgctgttcgcccagcaactgggaacccggctgccggtctcggacaagcgcctggccaagcagtggagccaggtcgagggctagttccagggataccgcgcgaaatgaaaaaggcgcgccggtcgaaaccggcgcgcctttttcgttctggtccgatcagtcgcgcaggttcagtgcgcgacggatggtgaagaacaggtcggtctggtcggtcaggccggtgacattggcggcctgcgggccgtaggcggcgatgcgcaactgggtgccggtgtgctcctgggagccttcctcggagttgccgtagctgatcgccagcggcgcgccgtccttggtcgtgagcagttgggtcagccccggcgcggcggtttccggcgggatgatctggctggagtgggcgtggtcggcggtgacgatcaccagggtctcgccatcggccttggcgaaggccagggccttctgcacggcttcgtcgaggtcgacggtctcgccgatctggccgcacggattcgcggcgtggtcctgcttgtcgatggacgcgccctcgacctgcaggaagaagccgttcggattgtccttcagcagctcgatggccttgctggtcatttgcgccagggtcgggatgtcggcggtgcgcttcgggttcgcctcgcagctcaccgccggctggttcaggttgccgtggtaggtggcggtcggaccgagccagcgcactggcatgttgcccggcgcgaacaggccgatcagcggctgcttctggttggcgcggcgcacggctttcagctcgtcgaggttctcgacgatccggtagccgcgggcttcggcctgggcgcggagggtcttgccggcatagcggccagccttggcggtttccgcgaaggtcgcggcgccgccgccgagaaccacgtcagggcgggtcttcagccactgctcggtgatcgagccggcgccgccgttctccagggcattgctcgggcactgcttgctggtggcctcgggaccgtagcacttgcgagcggtgacgtgggcgagcagggcggcgggggtggcgtcctgcagctcggcggtggagacgttgccggtggccttgccgttgagcttggccagctccagcaggttgcggtgcggctgttcgtggatatccacgccgatcgcgccgttgtacgacttgaccccggtggtccaggcggtggcggaggcggcggaatcggtcacgtagtccggcaggccgctgtccttgtgcagggagtagtgggtgtactggccggtcagcggcagcgcatcgatacccttgaagtagccgcccgcgccgcgcgcgtagttgcgcgccacggtgatctcggagtcgcccatgccgtcgccgatcagcaggatcacgttcttcgccttcttcttcgacagcgactgcttcagggcctgggtcaggtcctgctcgacgcgccgtgcgccgccgtactcgctgagttcgccacgggcctggcggttgaacagcgacggatcgtcctggcgcgcctgggccggcaaggcgctgccgagcacggccatggagacggcaagagagagggcgaggggataacctggggtcatgacgcatttccctatgttgaggaggtggctgtgcgagacggcagggccatccggcgagtgctacgaaagtagggaagggtgatgacgggcttgtgacaatttctttcgaagtgtgtggcgcgcgcgacgcatcacgtcgtgacgagcggggagcgagccggtatggtgcgcaggtctattccggttcgttcaaggaaagcctccatgagtctgcacggcgtttacgattcccagaacatcttcgccaagatcattcgcggcgaagctccctgctacaaggtctacgaagacgaggacgtgctcgccttcctcgatctgttcccgcagtcctacgggcataccctggtgattcccaagcacgccgaggcgcgcaacctgctcgagatcgatgcgcagaacctggccaaggtcatggccgtggtccagcgcctgacccgcgccctggtcgaggaggtgcagccggacggcgtgcaggtcgcccagttcaacggcgcccccgccgggcagacggtcttccacatccatttccacgtcatcccgcgcttcagcggcgagaatctcggcatccatgcggcgaagcagggcgacccggaagtgctcgcacaacttcaggagcgtttggcgcagcgtctgcaaggctgattgcgcatgggccggcccggttcgggggcggtccttcgctcgtcggatttttctgaaatattttgttacatactgtcgagggtcaggcgctccgcggttttccggcgatgtgcgcaacaatttgcacagtttttttgacgtagcatccgcgacatcccgctcttcggagcgaccacggcgaacagggacgccagccgtgcaggtttttcgagcaacaggggacagcggatgttcaacccggccaaccagacccacttcagcctcagcctcgacggcctccgccatgacctgcaggtcctcgccttcaacggccacgaaggcatcagtcgcccctaccgtttcgaactcgaactggtcggagagcgtgccggcctcgacctcgaaacgttcctccaccggcccgccttcctcgccttcaccccgcagggccagggtgtccacggcctggtctacggcgctgcccagggcgatgccggcaagcgcctgacccgctatcgcctcaccctcgtcccgcacctggcctacctcgcccagcgcaacaaccagcggatcttccagcacctcacggtgccgcagatcgtcgccctgatcctcgaggagcacggcatcctcgccgacgcctaccgcttccagctcggcacccggtatcccgagcgcgaatactgcgtgcagtacgacgaaagcgacctgcatttcgtccagcgcctctgtgccgaagagggcatccatttccatttccggcacagcgccgaggcgcacctgctggtgttcggcgacgaccagacggtgttcccccgcctgggccgtcccaccgcctacgtgcacgacagcgggctggtcgccgacgaaccggtgatcaagcgcttcagcctgcgcctggccagccgcaccacgcgcaccactcgccgcgactacgacttcgagaagccgcggctgctgctggaggccggcaatcgccccgctgccgacgccccggccgagccggacctggaggactacgactaccccggtcgcttcgtcgatcgccagcgcggcaagctgctcagccagcgcgccctggagcggcaccgcgccgaccggcgcctgggcgaaggggtcagcgaccagccgctgctggtcagcgggcatttcctggagatcgccgagcacccgcgcgcggagtggaacgacctgtggctgctcagcgaagtcttccacgaaggcaagcagccgcaggtgctggaagagaacgttacctccgacacgtcggccagcacggacgacttccagcagggctaccgcaaccgcttcctcgccacgccctgggaggtgttcttccgcccgccgctggagcacccgaagccgcgcgtgctgggcagccagaccgcggtggtgaccggcccgccaggcgaggaaatccactgcgaccgctacggccgggtcagggtgcagttccactgggaccgcgagggccagggcgacgacaagagcagttgctggctacgcgtagccagcggttgggccggcaacggctatggcggcatcgtcattccgcgggtcggcatggaagtgctggtggacttcctcgaaggcgatcccgaccagccgctggtcagcggctgcgtctaccacgccgcccacccggtgccctacgagttgccggcgaaccagacccgcagcgtcttcaagagcctcagcagccctggcggtggtggctacaacgagctgcgcatcgaggatcgcaagggccaggaacagatcttcgtccatgcccagcgcgactgggacgagaacatcgagcacgaccagaagatccgcgtcggccacgaacgccacgacaccgtggaggcgaacagctacagcgagttcaaggccgaggagcatcacaccgtgcacggagagcgcaaggtcgagctgaaggccgatgaccacctgacggtcggcgacagccagcacgtgaagctcggtcgtgcctacctggccagggccgggcgcgagatccacctgaaggccgggcagaagatggtgatcgaggctgacagcgaactgacggtgaaggccggcggcagcttcatccggctcgacgcaagcggcatcgccatcagcggcccgctggcacggatcaatgcaggcggcgcgccgggaagcggctcggggatcgcgatcaagatgccgcgggtgccgggcatggccgaccaggacagctccggcgcgccacccgaggcggtcgcggccaacctgccgccgcggcaaccggtctgcgaagagtgcctgctacaggcgaagaaaagaggccaggcgctcgccgagcgctgaggaaccgcgatgacgccgaacccccgccattgggcccgtgagctgtggcagcgctcccgcgatcgcggcttgcagacccacatcgatgtattggtcgatgccaccgggctggacgactatcccttgctcgccgagcatgcgcggcaaagcgatcctccggcgctgttcaaattgctggagcaaaccccggaggccgccctggccgacgagggcccgctgctgctgcgcctggaagacggccacgcggcctggctggacgaactgctcgaacgcatcgactgccgccgccacctgatgctcctgttcagcccctggccgttgccgcgcctgggcgagcacctgcgcagctgcacccaggccgagtggaaccagggtcgttccagcggcgtactgcgtttctacgagccgggcctgttcatggccgtcagcgacatgctcgatccccggcagagccgttacctgcatgccccggtttccagctggcactggctggaccgcgacggccggccgagggcgctggccggtcattaccaggcccacgagacgccgccgctgcaagcggccctccgcctggaagcgcaccaggtcgctgccttgcgcgcctggagcgaggccgaagcctaccgccgcgaatacttcgtgctgccccgcgagcatggcctgggcagccaggaaagcctgctccagcatctggtccaggcgcacctggccgccgaccgccagggcttgcaggacttcgaccagcgcgatgccttcgtcgcccaatggctacgcgaacagacccccggccccggcttttccccggcgggaacgagtcgcgcatgaacgggcgcggcatcggccttcccgccctgcttccggggcccctgctggccgcgagctgccagagcgggccggacatgctggcggcgccggtgatgggttacaaccatacgtccgcggcgatcaattggttttcggtgaatggggcgggtggaccgcgtttaggcccttatcagggggatggtagccaggtttgttgcggagtgattccaaagaagtggaatccaaatttgaaagctgtcgtggaatgggagaaagatcccaaaccgcacgccgctataaggcgagataaatatggacggctggataaagatgattacttgagacatgcctcaagctacacccgacacaagatgatcgtggatatacctagatatagtgaaaaaatatgcctgttgcaggtgcatttcctcccgtgtgaccaggtcgcggtctcaacaacctattacagccaggggcatccagagtacccagatagaaagtattttcagaagagagagccttcatgcaaaagctcttgaatgcaaaggggttaaggacacctgattggctgattgctttactgataggttttttgtttttacaagcgtgtcaggcaggctctgatatggtgtctactcctatcggaggatacaggcatacttcggcggctattaacagattcagtgtaaatggtgctggcggattaaaccttggtccatttcagggggagcatggcaggtatgttgtggtgtcgttcctagagtttggaagtcgggcttgaaggcaaccgtagagtgggaggtagttcctgagccaggggcttataaagactggccggaaagatattttcagatggctggagaaaacgtatgagagagcatgggctcttgtatgttcgtcataaggaagccgtcgatatacctccttgtgatagtaaggagatttgttcgctaaaaatacactttcttccatgtgataaggttgctacttcagctgcctgttatacgccgtttcatcctgaatatccgaataaaggttactttgatatgaggggtatgtcatgcagaagttgatgagtttgatctgtgtgggaactaaaaagtccattgggttggtggtttttctcagcaccttctttgggctggtggcatgccaagctgggcctgaagtgctgtctgcacctgtcatgggttacaaccatacttcggcggcgattaacgaatttacggtgaatggtgccggggggccaaacctgggccctcatcagggcggaggtgggcaagtatgttgtggcgtgattccaaagtactgggtgccgggtttggaggcgattgtagagtgggaaattgatcctaatcctaaggctgagctaaagcgagatcggtacgggagtctggatatgcaggactatcgacgacatgctaaaaattacacgcatcacaaggcggttgttgaaatacctaggtatgaaaggcctgggccgataagagttcactttctgccttgcaatcaggttcgtgtaactgctgcggccacttctccggggtaccctggatatccttataactatccgatggttatggagagagtggcagaatgtccgaagaaataaatgtcttgcgagaagatattcgtgtgactgtcagtgttgctcctgaatttccgaaggaaaggcttcttccgcttgagccaagtgttctctctaagaatataagtcggcaggtaaaagaagagcggaagtataatgaggaaaaaatcaagcgggatagggagggtggcggagaaagcagtggaataccttgttgtaaaactctgcatgtgagcataggctatgatggcactaataataatgatcgggctgatggtgcatcattgccgccttctagaagtaatgtggcaaagctatttcatgcttctgtcggagaaggttccgtgcaggaagggttgggtttctttcgatattactgccctggggttggtacggtatttccagatattcgggaatatactccgtcgagtctcggtttgattgcggcggcaggtggggagaacagagtaaactggggaataacccgcttggttgatgttttgcaaggaacgcttaccccagaaagtcctcttctgctagatgagtctcaaacaatgattaagaacatggcaaccaatggaattgccaaggttctaaccggtgggttgttggagaacggcgagaaaaaacgccgagctgccttggagccaaaactcaaggaactggaggaaaagcttcgccagcgtcaggactcagggcagaaaccgcatatcctggccatgcgtttgtatatctatggattctcccgtggggcggcggaggcacgagccttcgccaactggctgcaggagctgactcgggccagcggtgccgatggccgggtggaatatcgcttcgccggcctgccgatctccatcgagttcctcggccttttcgataccgtggcggcagttggactggcggatagcgcgccgttcgccgccggacatatggattgggccgacggcaccatgcggctgcccgacgaagcccaggttcagtgcctaccgaccacattgccggaagactgcgcttttctgaaacgttgcgtgcatttgatctcatgccatgagcagcgtgccagttttccgctggattcgatccgccgtcgcgacctggatgccaacggacgtcgtacggggccttcctgctatcggcagggtacggtggaatatgcataccctggtgttcactcggatgttggagggggttatggcgttggcaaccagggtaaggcggtgggaggttcggaattcctgctatcccagatagcgctgcagcatatgtatgcggaagcttttgatgccggtgctcctttgcaggttcccaaatcagccgttcatccggactttcatgaagtctggcgggagatgacgcctgaaaccgaagcggagttcagcgtctccgaagaacttgccacccgtttcaacgcctggcaggcccaggccaaggccggccccctggaagaggtgatccgtcgcgagaccgcgttgatcaccgcctggcgcatcgaccgctatgccggcgggctgcgcaacaaggcgttcttcgccaatgtcccgccggacatgccggaagcccagcagaaggcctgggaggccctgtacaagcggcgtagccgggagtacgcggccgcccagcagggcaagccgctcccgccgatgagcgccgccgaacaggcggagtgggatcgcaacgtggcgctgatcggcggcgaggacaaactgcgcgacctgcgggtggagaagcagttcgatccgccgctggaccagcgccaactactcggcgccgccgccgagttcgcccatgactacaagggcgactggggcgtgctcgacgacggcatgacggtgggcggagtgatcgacctgctgctcggcggcaccgtattcctgatcaacgaggaagacgaagccgaggaatacagccagatccaccgcgacggcagcgcgcgctaccaccagttgttcagcgctcccgaccgggtggcgccgggccaggaaaagctggtggcgctgttcgacgaacaggtgcacgactcccgcgcctggttcatgaacacttcggcgataggcccgcgagaacccttcaccgactacttccgctatcgcctggtgcatttcgacaacgagtcgaacaagcggctctcggtactggccaccgccgggcgggtggtaggtgtaggggtgatgctggccagcgtcggcctcagcgtcaagcgtcgcgatccgcggatgctgctcgggctgttcctgccatcgctggcgcgtccgctgctgagcggcaaggtcggcctgccggagatcagcgccttcgacccgctgaccgggatcgccttgccgatggtcggcggggcggcgctggacaacctgcgggccttcacctgcgagcctggcgacaaggtcgagcagatcggccagttgccgccaccgccgccgctggcggtcgcggcggtgcaatcgcccgcattgcagcaggtgctgctggctcagcagaccgtggaggcgctcaacgcgcgcgacctgggcagcctggccgggctggtggccaaggccgaactcacccaggcgcccgcggcggcgacgccggcctggctcgctgaggcgaagcaggccttgcaggacatgggtacggagcaggcgcaaccgccggaccccggctcggcgccgggctggctgcagcgcggcaaggacttgatggaatcgctttgaacctcgaccggcgaacgcggccgacctgtcgccccggatcattcggcgcggatgtcgaacccgctgctggcctcgctgacgatgcggaagcgcgcgttgccgtccgcggcgatccgggttctcagctcgcggctcagcaggcccttgccgcagagagtgtcgtcctgggtatcgatgccgataccgaccacatgctcgcccgccggcacctggaagctggcttcctcgccgacgccgatgcgcgcggcgacctggcggtcgataaggaacgccacgtagcagccgccgcccaggtagccatagtcgcggtggacctccagccggccgccaccgctcaccggttgctggtagccgagcaggcgttcggcggggatcgcccgggtcttctcggcgggaaccgaggaacagccagccaggaggaaaaggatcgctacggcgtacatcgggcgcatgaaggctctccgtcgaaaggtttcctcaggctagcccagtttcgctggagcgcggagcgacggggcggagtgggctagaatgcctggcctgttgttccggagccgactaccgatgcgccaggccctgctgatcgtcgacgtgcaaccctgtttcgccccgccggactggctgctggaaggcatcggccaactgctcgggcggatgccctcggtggccagcgtcgagcgccatgacgaatcccgtacgccgttccagcgccagctcggctggcgaccgccgctcgacgatgcctgcctggtggcggccgaccgggtcttcgtcaagcatggctacctgccgacggcggaactcgtcgaccatctgcgtgcgctgcgagcggaacgggtgctggtatgcggcatccaggccgacacctgcgtgctcgccgccggcttcgccctgttcgacgccggcctgcaaccgaccctgatcggcgacctggtgctcggctcctcgctggatcgctcgggggagctgggtgtgcgcctgtggaagcatcatttcggccaggtcgtcagcctggccgaggtgctggcggattgaggctcagtggggccggctgagcagcgcgaccgtggcctcggcattcatcatccgcgctgccgccagcggcgtcagcccggcggcgtcctgggcgtcacgacgggcgccgtgggccagcaggctggcggcgacctcggcctggttgaacatggccgccatcatcagtgcggtcttgccgtcggccgaggcgccctcgacgtcggcgccgccggcgaggagcagttcgaccatcgccaggtcgcccttgaacgcagcgccggccagcggtgtctgcccggccaggttgcgcaggtccgggtcggccttgtaggccagcagcaggcgtaccgtgtcggcgtggccatggtagctggccagcatcagcaggctgtcgcccttgtggttgcgcaggttcggcggcaggccctgttgcagcagttgctcgaggcgctggctgttgccctggcgggccaggtcgaacagctggtggacgaactcctgggtttccatatccagttctggacgagggctatcggtcatggggctgcttccttgtgaataccgggtttgccgaatgataggcggccttgccgaggtgggctgttgagcattgcctatggggcgggttggcaaagtcaatcgatggttggggtgggaaggtgccagcctgctgtgaccggaagccggcctggttgcgtcgtctttacagttcgatacggatatcggtggcgaaaacggggaaaataaaccgatcgtgcgcctatcggctgtgcccggcgcgcactctggaatatccttggcgccttcgataccactgagcggtgcgcgcgcttgccgaagcgaggcggtggcacactgcgcaatggccgaccttgcccgggccctgtacgaaagcgcgtcgccaacgtcttttcgtagagcgcccggcatcgccgcgagcgaacccgtttccggtgccggccccaggcgggcaccgctatgcctaatcggccccgttcgacggcggcccagcgagagaagaggaacaactgtgcataaagccgtcatcagcggaaccggtctttatactccgccctacagcatctccaacgatgagctggtggagagcttcaataccttcgtgcgccagtacaacgaccagcacgccgaggccatcgccaagggcgaactggaggcgctggccgagtccagctcggcgttcatcgagaaggcgtccggcatcaagagccgcttcgtgatgaacaaggaaggcatcctcgacccgcagcgcatggttccgtaccttcccgagcgcagcaacgacgagtggtcgatcctctgcgagatggccgtggccgccgccagggaggcgctgcagcgtgccggccgcagcgccgccgacatcgacggggtgatcgtcgcctgctccaacctgcagcgcgcctacccggcgatcgcggtggaggtgcaggccgcgctgggcatccagggctacggctacgacatgaacgtggcctgctcctcggccaccttcggtatccaggccgccaccaccgcgatccagaccggccaggcgcgggcgatcctgatggtcaacccggagatctgcaccggccacctgaacttccgcgaccgcgacagccacttcatcttcggcgacgcctgcaccgcggtgatcgtcgagcgcgccgacctggccgtgtcgaagcaccagttcgacatcgtcagcaccaggctgctgacccagttctccaacaacatccgcaacaacttcggcttcctcaaccgcgccgacgagagcggtatcggcaagcgcgacaagctgttcgtccaggaaggccgcaaggtgttcaaggatgtctgcccgatggtcgccgagctgatcggcgagcacctggcggccaatgaaatccaggtcgccgaggtcaagcgcttctggctgcaccaggccaacctgaacatgaacctgctgatcacccgcaagctgctcggccgcgacgccgaggcgcacgaggcgccggtgatcctcgacagctacgcgaataccagttccgccggctcggtgatcgccctgcacaagcaccaggacgacctgcccagcggcgccatcggggtgctcagctcgttcggcgccggttactcgatcggtagtgtgatcctgcgtaaacactgatcgtggcggcgcctaccgacgccgagctgctgccgcgcctgctggccggcgagcagcgagccttccgcgagctggttggcgcctaccagggcgccatgcgggccgtggcctgggcgatcatcggcagatcgcataccgaggaagtggtgcaggacgcctggctcgcggcggttcgcgggctggacgggttccaggggcgttcgagcctgaagacctggctgctgaccattaccgccaataccgccaagagccgcttgcgccaggttcgccgggaagttttcctcgacgacctgccggggccccatggtacggtggatgaccagcgctttgccgccgacggtcactggagccagccgccgcacgcctggcacgaggattcgccggaagccctgctcgccgagggcgaactgcgcgattgcctggacaagaccctcaacggtctgtccgagctgcagcgcagcgtgctgaccctgcgcgaacgccagggcttggagctggaggaaatccgtgatctcctggatatcacgctttccaatgtccgggtgctgctgcatcgcgcccgcctgaaggtcttcgccaccctggagcatttcgaggagaccggccaatgctgagttgcaaggaactggtcgcccggtccagcgactttctcgatgggcaactggacttccgcggacaactggcggtgcgcagtcacctgctcatgtgccggcattgccggcgcttcatccgccagatgcgcctgacccaggcgaccgtgcgccatctgccggaggggcaggggccggaactcgaccgtctggccgcgcatctctccgaattgcgcaaggacgccgcgcggcgctgagccggggtatcctcgacaccaagccgccgcccgcgattcgtgggcggcggctttttcgtttccgctatccggcgtgggcgaaccggacccggcctggcgtgggcggctctctcttccgcgtgacgaggtcgaggagtgtggctgggcttggcggatatcgctgcgcgatatgcgccctacggaggggcggcaatccgtttcgctgggcgagcatccgaagttgaggagaacgcctgggacctggcgaatatcgccgaccgatatttctccagcaggggcaatccctgagttcaggcaaagggacgggaaatttttttcgaatccgctgtaacgccgccgggggtgctccgtccattggagcgaggacgccataccggcgcccgctaccaacttcaggagttacccatgaaaaagatttccctcgcttcctccgtcgtcggcgctgctctgctcggcgtagccagtgtcggcgcgcatgccgcgcagaatcccttcgccgtgcaggagctgagcagcggctacagcgtggctgccgccgagaaggccaaggaaggttcctgcggcgaggccaagtgcggtgccgacaagggcaagcgcgaagcctccaaggcaggtcatgaaggcagctgcggtgcggatcgcaaggccaaggaaggttcctgcggtggcgagaagaaggccggcgaaggcaactgcggcgccgacaagaagaagtcgtaaggcctgaggagacggaccatgcaacgggaattcgtcagcggcgccgggctaggcctgcgtcgcgcgctgctggagccgctcggcgccggcgatgaggtccgggtcgacttcctcgaggtcgccccggagaactggatcggcatcggcggccgtctcggccgccagttccgcgagctgaccgagcgcctgccgttcctctgccatggtctgtctctcaaccttggcggctacgccccgctggacatgtcgttgctgcgcgcgatcaagggtttcatcgagcagcatgacatccgtgcctacagcgagcacctgtcggcctgcgccgacgacggccagctctacgacctgatgccgctaccgttcagcgacgaatcggtgcgccgggtcgccgaacgggtccgggtggtacaggacgtcctcgagcggccgttgatcgtcgagaacgtctcggcgtatgcgcgcttgccgggcgagctggaagaggtcgatttcgtccgcgcggtactggaggaagccgattgccaattgctgctggacgtcaacaacgtctacgtcaacgcctgcaacttcggtttcgacgcccacgcctacatcgccgcgatgcccagccggaggatcgcctacctgcacatggccgggcacgacgagcagggcgccagcctgaagatcgacacccatggcgcgccggtctgcgatccggtctgggaactgctggcacatgcctatgcctgccatggcgaacgcccgacgctgctggagcgcgatttcaacctcccgccactgagcgagctgtatgccgaaaccgatcgcatccgcgagctgcagcggcgcagcggtgaagcgcaactgcgcagcctggggtacggcacatgaaccacacgaccttgcaacggcgtttcgccgcacgtatccgcgatccgcagcaggccttgccgcccggcatcgcgacggagcgcatggcgatctacgaggaactgttcttcaacaacctggacggtttcatcagcagcggtttcccggtcctgcgccagttgttcgacgagccgcgctggcatcgcctggtgcgtgccttcatgcgcgagcatcgctgccgcacaccgtacttcagccaattgggcgaggagttcatcggctggctgcaggacggctaccgcgcggaggagggcgatccgcccttcctgctggagctggctcactacgagtgggtcgagctggccctgtcgctggccgaggcgcctgtcgagacgctgccgcaggcctggtcgtggtcgccactggcctggccgctggcctatcgctggccggtccatcgcctggggccgagccatcggccgatggagccgccggccgagccgacctgcctgctggtctggcgcgatccggcggagcgggtgcgcttcctgcacctgtcgccattcgcctatcgcctcgcgcagcgcctgagcgaggagggcgaggcgccggtggcgctgctgccgttgttgcgcgagttggccggaagctgcggcctgagcgccgacgtggagtatttcgaaaatgccttcgccttgctggaggactggcacgcccagggcatcctcatgggcgagggcgctctggagtgatgatgaagactgtcttcctgcgtttacagcatgccctcgacgtcacccgtcgagcggatttcctcgccccgctggcgctgcgcctgtacctggcgccggtgttctggatggccggctgccagaagctggcggacatgccggccaccatcgagtggttcggcaatcccgactggggactcggcctgccgtttcccgaactgctggcctggctcgccgcgctgagcgaggccggtggcgccgtgctgctgttgtgcggcctggccgtgcgctggatcagcctgccgctgatggtgaccatgctggtagcgatcttcgccgtgcactggccgaacggctggcaggcgatcgccgatccgtccgcgccgttcgccaacgcccaggtgctggaggctggcgagaagctggcgcgagcccgggaaatcctgcgcgaatacggcaactacgactggctgacgtcgagcggaagcttcgccatcgtcaacaacggcatcgagttcgccgcgacctacctggtgatgttgctcgcgctgttcttcggcggcgccggcaagtggctttctgctgacttctggattgcgcgaaaattgcgctgagatttctacccatatcgaataacccgaaaggcccgtagtagagggcttttcgcgttattcgcattggagataaaaagttcctatgtaatgaaacatttatctccatgcaatttggctgcaatctgccatcgccaagattccccccaacacaaaggggccgccttacggccagcgcggaacaaggggcgcgctgtagccaggcactcgcgtgttgccaatgcacacaccattaaggggaaatcttcgatgatccgtaagcactcgctcggcttcgttgccagcgctctggctctggccgtatctgcccaggcgttcgccggcaccgtgaccaccgacggcgccgatatcgtgatcaagaccaagggcggcctcgaagtcgccaccaccgacaaggaattcagcttcaagctgggcggtcgcctgcaggccgactacagccgtttcgacggtttctataccaagaatggcaacaccgccgacgccgcctacttccgccgcgccttcatcgaactcggcggaaccgcatacaaggactggaaataccagatcaacttcgacctgtcgcacaacaccggcagctccgacaacggctatttcgacgaagcttcggtcacctacaccggcttcaacccggtcaacctgaagttcggtcgcttcgaccccgacttcggcctggaaaaggccaccagctccaagtgggtgaccgctcccgagcgtaacgccgcctacgaactggccgactggatcaacacccaccaggacggcatgggcgcccaggtcaactcgaccctcgccgacatggcctacctgtccgccggcgtatccgccaaggacgccgacgacagcgacggcgacagcgtcaagcagttcaacttccgcggcgtgttcgcgccgatgcacgaagccggcaatgttctccatgtcggcgtgaactatgcctaccgcgacctcgacgacaccgccttcgactcgcgcatccgtccgcgcctgggcatgcgcggcatcgccaccagcggcggcaacgacgccggtgacaacggcaaccgcgcgaccttcggcggcgtctccaactcgccggccggttcctacaaggacgacagcgtctggggcctggaaggcgcctgggcgatgggcccgttctcggcccaggccgaatacctggcacgcaagctgaaggccgatgacaacgcctacaaggacatcaaggccaagggttactacgcgcaactggcctacaccctgaccggcgagtcccgccagtacaagctggaaggtgccaagttcgactccgtcaagccggaaaacaaggaaatcggcgcctgggaagtgttctaccgctacgacaacatcaaggtggaagacgacaacgtggtcgccgataccgccactcgcgaagtcggcgacaccaaggccaaggcccacaacctgggcgtgaactggtacgtcaacgatgcggtgaagatcagcgcggcctacgtcaaggcgaagaccgacaagatcaccaacaacaatggcgacgatgacggcgacggcttcgtgacccgcttgcagtacgtgttctaagaagcgacaacgatctgctcctgttttcggcctcgctccggcgaggtctttttaatcgcttccttacccggttgtggcgatgttggcagcctgcaaccgggtctttctttcgttacaggtctacccgcaggtactggcaggaatatccgaaagccagacggttatcggcagaaactcttggttttcattgcagtcatgcaatcttcgcaaggttgtcgcaatatatgaaacaagctgttacatctgtcgcccggacctgatgcctctaggcctgcgcccttatccgacggcctcatccaggcgctatccggctgcctgtcacaaaagctttcgcgctttgcagtctcgctgtcacaacccatccagatgatccccctccagcagcgccggccggcgatagaaccggccgtttccgcgctgctcaagaccattcgaaatccgaacaggggacttacctgatgattcgcagacactcgtgcaaaggggtggggagcagtgttgcctggagtttgctgggcctggcgatttccgcgcagagcctggccgggaccgtgaccaccgacggtgccgacatcgtgatcaagaccaagggcggcctcgaagtcgccaccaccgacaaggaattcagcttcaagctcggcggccgcctgcaggccgactacggccgcttcgacggctactacacgaacaacggcaataccgccgatgccgcctacttccgccgcgcctacctggaattcggcggcaccgtctaccgtgactggaagtaccagatcaactacgacctgtcgcgcaacgtcggcaacgacagcgccggctacttcgacgaagcctcggtcacctataccggcttcaatccggtcaacctgaagttcggccgcttctacaccgacttcggcctggaaaaggccaccagctccaaatgggtcaccgcgctggagcgcaacctcacctacgacatcgccgactgggtcaacgacaacgtcggtaccggtatccaggccagctcggtggtgggcggcatggctttcctctcgggcagcgtgttcagcgagaacaacaacgataccgacggcgacagcgtcaagcgctacaacctgcgcggcgtgttcgcgccgctgcacgagccgggcaacgtggtgcacctgggcctgcaatacgcctatcgcgacctggaggacagcgcggtggatacccggatccgtccgcgcatgggcatgcgcggcgtctccaccaatggcggcaacgatgccggcagcaatggcaaccgtggcctgttcggcggcagttcggcagtcgaggggctgtggaaggacgactcggtctggggcctggaaggcgcctgggcgctgggtgccttctcggcccaggccgagtacctgcggcgcacggtcaaggccgagcgcgaccgcgaggatctcaaggcctccggctattacgcgcaactggcctacaccctcaccggcgagccgcgcctctacaagctggacggcgccaagttcgacaccatcaagccggagaacaaggaaatcggcgcctgggagctgttctaccgctacgactcgatcaaggtcgaggatgacaacatcgtcgtcgacagcgccacccgcgaggtcggcgacgccaagggcaagacccataccctgggcgtcaactggtacgccaacgaggcggtgaaggtttccgccaactacgtcaaggcgaagaccgacaagatcagcaatgccaacggcgacgatagcggcgatggcctggtgatgcgcctgcagtacgtgttctgaggcgctcgggccccgtccggcgggcggggctcgtttccgcaggatgttacccgcgtcatgaaattgcctggtggatgtccgggcgggccgcccagcttgacccagggcacagatcgcatggcggcatctggctatgctggtccctcggaaacgctctgggagggactgatgatcggctggggacgtgcctgtattggcgtcggggggctgctgttgctgggccagttgctggggggcgccctgctgctcgcggacgacggcgaagcgacgctggcggtcgaacacttctggcaattcgtcttcctgatcccggcgatcctggtggcactgggaatgttcgtcctgcagcatcacgtgggttccttcgcccagttgtaccgccggcgtctcgatggcgcctcctacctgctggtttcctgcggcatcgccctggtcctgggcaagctctgcgtcctgctgctcgcctgagcccctcgcgcggcccggcatgtccgggtttgcccgaggcattcagcttcctgatttagccggagggcgctgaaacccttggttacactggccttcatcacacgaacaggaaggcaggaccccctatgcaaaaccgcatgatgatcaccggtgccggctccgggctggggcgcgaaatcgccctgcgctgggcgcgtgacggctggcgcctggcgctggccgacgtcaacgaggccggcctggcggaaagcctgaaactggtgcgcgaggcgggtggcgatggctttacccagcgttgcgacgtacgcgactacagtcaactgaccgcgctggcgcagagctgcgaggagaagttcggcggcatcgacgtcatcgtcaacaacgccggggtggcctccggcggcttcttcggcgagttgtccctggaggactgggactggcagatcgcgatcaacctgatgggcgtggtcaagggctgcaaggccttcctgccgttgctggagcgaagcaagggcaagatcgtcaacatcgcctcgatggcggcgttgatgcagggcccggcgatgagcaactacaacgtggccaaggccggggtggtggcgctttcggaaagcctgctggtagagctggcgctggtcgaggtcggcgtccatgtggtctgtccttcgttcttccagaccaacctgctggactctttccgcggcccgagccccgagatgaagcaccaggtcggcaagttgctggagagttcgccgatcagcgccgccgacatcgccgactacatccacgccgaagtggccaagggcagtttcctgatcctgccccacgagcaggcgcggatggcctggaggatcaagcagcagaatccccaggcgatctatgacgagatgaccgcgatggccggcaagatgcaggccaagcgtcagcgccaggcctgagtggaaatggctgcaggccagcaggggcgcggctttgcaccattgcggtgcggcgcagatagtgcttgcccaaggcggtgcgatcgagtagcttgaatcaccggcctgcctgccgaagtacgttggaccccacaagaagcctcgctcatttgcgaggctttttgcttttccggcctcgcgccctgtgctagaaggctgcctctgcgagtccgttctgttctggagtacccctgtggagtctgaatccatcgtctatggctgcatccgcgactggccgggcgattcgatggaacggcgcatgcgccgtgccgccaaccgccgcgtgctggacagcctgccgggcggcgaggcctggccgttcctcggccgcgagatgttcagccgctgcgagcagtccggggccgggctctaccagacccagatcatccacttcggtgccagctaccaggccatcgaatacgagtggagcctgtgggtcgagcagttcgaggcgttgctcaggcgcctctactgggccagcgcggtggtccacctagagaccgaagtgaacggcagccatacctttcgctgggagtccgagcgtggcttccataccccccaggagagcgacctgcaggtccgctgcgcctgggagcgggagggcgggcggcggtgatcaactacctctggttcgtcctcgcggcgttctgcgagatcgccggctgctacgctttctatctctggctgcggctgggcaagagcgccctgtgggtgctgcccggcctgctcagcctgaccctgttcgccttgctgctgacccgcgtggaggccagctacgccggccgcgcctatgccgcctatggcggcatctacgtcgccgcgtcgctgttctggctggcttttgtcgagcgctcgcggccgctatggagcgactggctgggcgtggccttgtgcgtggtcggtgccagcgtcgtgctgttcggcccgcgcctgtctcagtgactcaggcggggtgggcggcgcgcccgtcacgggcgccgggccccgccgtcccgggccgccgcaccccgaaccggcggatcactgcgaagtgttgcgctgcacgtcgcctttttcctgatccagttccttgagcatctgcgcgtaggcatcgcaatcgctcggccggttctgttccgagcgggcttcctggcgctggcgcaactgctcgttgagttccctggcccgttgcgggttcttctgggtgatcgaggcgaccttggtggcgacttccttgcccatcttttccgcctccgcttcggaacaggcgaagaccggcgtggcgaccagcaaggcgcaggcgctggcgagggcgaaaagcggtttcatggcgtactcctgtggggtggtcctgagcggtggagcccggtcgagccgacaaagttcagccgcaacgccggacggcgaccgattcgaaccctcgcggcgggttgcgggtcgcacgcatagagagggtgcgaaggaccctcgtcgcttatgccgcaggaggtatgccatgactcacgattgggatctggtcgaacggttgctgctggaggtccggcagtccgcccatgagaacttcgccccgcgcgcccatgccgaacgcctggccgaggaacgctcccaggccgggcagcgggtcggtgacatggatgcgttgaagcagaaggccgccgactacgaggcgatcctgctggagggcggcttcatcgagccgcgtccggaagagcagggcggcaatggcgagaacttcgtcctcacgccgcgcggcgagcgcctgctcggcctgatcggcggcgagacgccgaaggccgccgaggctcgccggctgctcgaggagaacggcagcgaagcgctgcacgccgagcgcttcgaccgtttcgtcgccgggctctgaaactgcgcccgacgggcgatcggcggggcttgtgagtcgcccgcggcgccaccatagtgcggagcatgatgcctatttcatcctcttccgcccgccgcgccgagccggctccgcggcccctggcggagttccatcccgccgtccgccagtggttcgaacgccacttcgccgcgcccacgccggcccaggtcgaggcctggccggcgatccgcgaggggctttcgaccctggtcgccgcgcccaccggttcgggcaagaccctgaccgccttcctcgccgccatcgatgccctggtggtggaggggctggccgccggcggcgagctggcggatgccacccaggtggtctatgtctcgccgctgaaagcgctgtccaacgacatccgcatcaacctggagcaaccgctggccggcatccgcgaggaactggcgcgtctcggcctgcccgacatcgatatccgtagcgcggtgcgcaccggcgatacgccgcaggtcgaacgcggagcgatgcgcaagcgcccgccgcacatcctggtcaccacgcccgaatcgctgtacatcctgctcggctcggagtcgggccggcagatgctcgccggggtgcgcagcgtgatcgtcgacgagatccatgccctggccggcagcaagcgcggcagccacctggcgctgtcgctggagcgcctgcaggcgctgagtccgcgaccgctgctgcggatcgggctgtccgccacgcagaagccgatcgagaaggtcgcgcgcttcctcgtcggcgccagcggcaatccgcgcgatccggcctgccggatcgtcgacatcggctatacgcgcccccgcgacctgggcatcgaggtaccgccggtggcgctggaagcggtgatgtccaacgacacctgggagctggtctacgaccgcctggcgcacctggccggcgagcaccgcaccaccctggtgttcgtcaacacccggcgcatggccgagcgggtcacccgcttcctcgccgaacgcctcggcagccgccaggtggcggcccaccacggcagcctggccaaggagctgcgcctggatgccgagcagcgcctcaaggccgggcaattgaaggtactggtggcgaccgcctcgctggagctgggcatcgatatcggcgacgtcgagctggtctgccagttgtcgtcgccgcgctccatcgccgccttcctgcaacgggtcgggcgttccgggcacagcgtcggcggcacccccaagggccggttgttcccgacctcccgcgacgacctggtggagtgcgcggcgctgctcgacagcgtgcgccgtggcgagctggacagcctggtgctgccgcgccagccgctggacgtgctggcgcagcagatcgtcgccgaagtggcctgccaggagtggcgcgaggacgacctctatcgcctggtgatccgcgccgagccctacgccgggctggagcgcgagcgcttcgacgaagtcctgcggatgcttgccgagggctaccactcacgcctcggcgtgcgcggcgcctatctccatcgcgatgcgctcaacggcctgctccgtggccgccgtggcgcgcggctgaccgcgctgacctcgggcgggactattcccgataccggcgactacagcgtgctgctggagccgcagggcctgctggtggggacggtcaacgaggacttcgcggtggagagcctggccggcgacgtgttccaactgggcaacacctcgtaccggatcatccgcatcgagccgggacgggtacgggtcgaggacgcccagggccagccgccgaacattccgttctggctgggtgaggcgccggggcgcagcgacgagctgtcggccagcgtggcgcgcctgcgcgacaccctcgacgagctgctcggcgaaggccaggcattgccggaagggcagcggctggagccagccatcgcctggctcggcgccaccctcgggctggacgatggcgccgcgcggcagatcgtcgagtacctggcccgcgcccgccaggccctgggtggcctgcccgggagccggcggctggtgatggaacgcttcttcgacgaatccggcggcatgcaactgatcatccacagtcctcacggcagccgcctcaaccgcgcctggggcctggcgctgcgcaagcgtttctgccgcagcttcaacttcgagctgcaggcggcggccaccgaggacgcgatcatcctctcgctgtccaccagccacagctttcccctcgacgaggtctggcgctacctgcattcggcgagcgccgagcatctgttggtacaggccgtgctcgacgcgccgctgttcggcgtgcgctggcgctggaacctgaccacttcgctcggtttgccgcgctatgccggcggtcgcaaggtgccgccgcaactgctgcggatgaagagcgaggatctgctggccagcgtgttccccgatcaggtggcgtgcctggagaatatcgtcggcgagcgcgaggtgcccgatcacccgctggtggcgcagaccctcgacgactgcctgcacgaggcgatggattgcgacggctggctggccctgctgcgcgacatggagagcggcgcggtggacttgctggcgcgcgacctgccggcgccttcggcgttggcggcggagatactcaccgcgcgtccctacgcctatctcgacgatgcgccgctggaagagcggcgtacccaggcggtacagaatcgccgctggagcgatcccgagtccgccgacgatctcggcgccctggaccttgaggcgatcgaggcggtgcgtggcgaggcctggccggaagcgcgcaacgccgacgagatgcatgaggcgctgaacagcctgggctacctcacctcgggcgaggccgaggccaatccgggctggggggaatggcttgcgcaactgtcggagcaacgccgcgccggacgcctggactgcgcaggcagcattctctggctggcggcggagcgcctgccggcgatgcgcctggtgcatcccgcggcgaaggtgcccgacgctttccaggcgcctcgcggctatccgccgccggactcggcggaagcggcgaccgtggagctgacccgcgcccgcctgggtggcttcgggccgcgcacggccgggcagttggcggccgacctgggcatcggcctggccgaccagcagtacgcgttggccgccctggagcgcgaaggctatgtgctgcgtggccgcttcagtcctggcgcgacggaagaggagtggtgcgaacgccatctgctggcgcgcatccatcgctatacggtgaagcgcctgcgccgggaaatcgagccggtgcagcgcgccgatttcatgcgcttcctgttcgactggcagcgcctggcgccgggcacccgtggccggggagcggagtccctggctacggtggtcgagcaactggaaggcttccaggccgcggcggccgcctgggaaagcgaactgctggcagcgcgggtggccgactacgccagccattggctggaccagctgtgccgttccggacgcatcgtctgggcgcgcctggccggacgcagcaaggccgccggcggtccgctgcgcagcgcgccgatcgtgctcctgccgcgccgcgagctggggctctggagcgtcctgcagcgcgacgcgccggagccggaactgtcgccgcgcgcggccagggtactggaggtgctgcgcgagcagggtgcatcgttcttcgacgaactgagccaggacgcccacctgctgcgcagcgagctggagaacgccctcggcgagctggtctcggtcggccgggtcaacgccgacagcttcgccgggctgcgcaccctgctgatgccggcggacaagcgcagccgccaggagcgccgctcgcgcggcctgccgggcggcatgcaggacgccgggcgctgggcgccgctgcgccgggcgaaggcggaagaggcggggcagcgtttgccggcggaggttctcgaacatgtcgcccggaccttgctgcgacgctatggggtggtcgcctggcgcctgctggagcgcgaggccgactggctgccgccgtggcgcgagttgctgcgcgtctaccatcgcctggaagcgcgcggcgagattcgcggcgggcgcttcatcgccggcctggccggcgagcagttcgccttggcggaagcggtcggcctgttgcgcgaggtgcgcaagcgaccgccggatggggcgatgctggtggtgtcggcagtcgatccgttgaacctggtcggcggcctgctacccggcgaacgggtgccggcggtgaccggcaaccgcctgctctatcgagacggagcgccgctggcggcgctggtagccggcaaggtgcggatgctcgcggaagtcgacggcgagaccgcgcagcagatccgtgcgctgctgatccgccgtcactgaggcccgctcagcgcaggctcagatggcggctgagcagggcccgcaacgcggccggcttgaccggcttggacaggtagtcgaggccggcggcgtggatctccgccaccagttccggccgcgcgtcggcgctgatcaccacgcccggcaccggctcgcccaggcgcgtgcgcagccaggccatcaattgcgtaccggtctcgccgtcgtccaggtgatagtcgatcaacgccagttgcgggcgcatctcgctgtccagcagcgtggcgcattcctcgcggctgcgcgcggtccagacctggcagccccagcggctgagcaggctgttcatgccggcgaggatgctgtcctcgttgtccacgcagagcacctgggcgccgttcagcgcctgcgccggttcggccttgtggccgttggccagggccggcggcgcctgccgcgccagcggtacgcggacgctgaagacgctgcccttgcccggccaggaacgtacttccagcggatggccgaggaccttgcagagccggtcggcgatcgccaggccgagaccgaggcctttctccgcgcgggtctggtggctgtccaggcgcttgaactcttcgaagatgactttctgcttgtccggtgggatgcccggcccctggtcccagacctccaggcgcaggtagccgtcctcgcggcggacgccgagcagcacgtggcccttggcgtagcggaaagcgttggtcaggaagttctgcaggatgcgccgcagcagcttgatgtcgctgtccacccgcagctggctgccgcgcaggcggaaatgcaggccctgttcctgggccagcgccttgaactcgacgccgagggcatcgtagaggttgttcagcgggaacgggttgcgttcggcgctgacccggccgctttccaggcgcgagatgtccagcaggtcggtgatcaggtcctcggcggaacgcagcgacgagtcgaggtgctgcaccaggtcgcggacctcgccgggcagcgcgtcctggtgggcgagggcggcggagaacagccgcgcggcgttcagcggctgcatcaggtcgtggctgacggcggcgaggaagcgggtcttcgactggttggcggcctcggcgttgctcttcgcctcgctgagttcctggttcaactgcgagagttcctgggtacgctcctggacccgctgttccagcgactcgttggcgcccttgaggccctgttcggcctcgcggtaggcagtgatatcggtgaagctcatgacgaagccgccgccgggcatcgggttgccgatcagctcgatgacccggccgttggggaacagccgctcggaggtgtgcggagtgccctggcgcatccagtacaggcgcttggccacgtgcatgtccggatcgccgggcccgcacaggccgcgatcagcgttgtagcggatgatgtcggcgatcggccggccgacgtagatcagcccgtccgggtactcgaacagctccaggtagcggtggttccaggccaccaggcgcagcgactggtcgaccacgctgatgccctgggtaatgttctcgatcgcgccctgcagcagggcgcggttgaattgcagcacctcggaggcttcgtcggcgatccgcaccacgtcctccacctgcatctcgcgcccttcgatggcggccttcaccaccgcccgcgccgaggacgcgccgaggaccccggcgagcaggcgctcggtgtgcgcgatccactcgttgttggcggtctggttcggggtgaagcccttgccctggcggtaggcgaagcggatgaagctttgccgcgcgcgttcctcgccgacgaaacgcgcggcgagcatcagcaggtcttccacctgcaccgcgagcatgaagcgcgagttctgccgctgggagatctcctggccgatgaagcggctggcctgccagtgctcggacacgcgggtgcgcgagagcaccgagaccaggccgaacagggcgaagttgccgaccagcgagatcagcacgccctgggtcagcggctcgatcggcaggccgaagggattgcttgccagccaggtcaggccggggatgcgctccagcggccagccgaggcccttggccaccaccggcaggaccagcgtataggcccacagcagcgagccggcggcgaggccggcgaagaccccgcggcggttggcctgtttccagtacagcgcgccgatcatcgccgggccgagctgggcgatggcggcgaaggcgatctggccgatggtcgccaggctggcgctggagccgagcaggcggtaggccacgtaggcgagcagcaggatcaccgcgatgctcacccggcgtacggtcagcagccagtgacggaaggcctcgaagggccgttcggtgtccttttcccggcgtcgcagcagccacggcaggagcatgtcgttggagaccatggtcgacagcgcgacgctggcgacgatgaccattccggtggcggccgaggcgccgccaatgaatgccagcagggccagcgccgggtgcgcctcggccagcggcaggctgatgacgaaggagtccggcattaccccggcgggcaggtgcaactggccggcgagggcgatcggcaccacgaacaacgcggccagcaccaggtagatggggaacacccagcgcgccaggttgaggtcgcgcggctcgatgttctccaccacggtgacgtggaattgccgcggcaggcacatgatcgctgtcatcgccacgccggtctgcagcagcatcgccggccagtgcacggtctcttcccagtagtcggccaactgcggcgcggcgcgggcctgggagaagagatcggcgaagccgtcgtagaggccgaaggtgacgaagatgcccacggcgaggaaggcggtgagcttgaccagcgactcgaaggcgatggccaggaccatgccgcggtggtgttcggtgacatccaggctgcgggtaccgaagacgatggtgaacagcgccagcaccagcgacacgatcagcgccgtgtcctgggcgcgggtaccggtggagtcggcgccggagccgatcagcaggttcaccccgaggacgatacctttcagttgcagggcgatgtagggcagcacgccgaccatgcagatcagcgccaccaccaccgccagtgcctgcgacttgccgtagcgggcggcgatgaagtcggcgatggaggtgatgttctcctgcttgctgatcatgatcatcttctgcagcacccagggcgcgaacagcatcagcaacaccggtccgaggtagatcggcaggaacgaccagagctggtcggtggcctggccgaccgcgccgaagaaggtccagctggtgcagtacactgccagggagaggctgtagacccaggcgcgcaggcggggtgagagcggggtgcggcgacggtcgccatagaaggcgatggcgaacaggatggccatgtagaccagggcgaccacggcgatcagcccgatggacagcgacatgcgaactccgatgatgtccccgcgtgaagctggcgtgaggcgggggtcttgctttcgcgccagtttcgcacttgtcggcccgcgcgtcaggccgcctgcgaccaaggtcgcacgcatgcttgagccggacgcgcggagttggtagcgtgccgggctgcgtgagcgcggacggccccggcggccggctgtccgttcatcgtagccggtttcggctgcggcactaaacgcggccgctacgctctgatgggagcggagttttgcgtcgatgtcgaggagggcgcccatgttcaagccgctaccgatcaccctgcagcgcggagccttgcgtctcgagccgctggtggaagcggacattcccgagctggtgagcctcgccgaagccaaccgcgaggcgctgcagtacatggacggaccgacgcggccggactggtaccgccagagcctcgccgagcagcgcgagggcagggcgttgccgctcgccgtccgcctcggtgtgcaactggtcgggaccacgcgcttcgccgagttccttcccgccttgccggcctgcgagatcggctggacctggctcgaccaggcccagcacggcagcggcctgaaccgcatgatcaagtacctgatgctcaagcatgccttcgacaacctgcgcatggtccgcgtgcagctcagcacggcggcgagcaacctgcgcgcccagggctccatcgacaagctcggcgcgcagcgcgagggcgtgctgcgcaaccaccggcggctggccggcgggcggctagacgacaccttcgtctacagcatcaccgaccacgaatggccgcaggtcaaggcggcgctggaagccagcttctccggctgaagccggttccgtcgctcctgcggtatgctgggcggcccgtccggacgggcgaacgaggagacggcagtgccggacgagacgagcggagaacacacgcatttctggcgcgccgccgaactgggcggcgtcgaactgctgcacgcgcgctatgtggagcagcgcttcgcgccgcacgtgcacagcagcttcgccctggtcatcatcgagcagggcgcgcagcgcttccgccatcgtggcggcgagcacctggccccgctgggcagcatggtgctgatcaaccccgacgaagtgcacaccggctccaaggcccatgatgccggttggctctatcgcggctactacccggaaatggaacagatcgacgggattctcgacgagctggaaatccatcatggcggcgtgccgcgcttcgccgacagcgtgatccacgaccagcccctggcacgcgccttcgtccacttgcaccgcctgctggccgagcatgccgacagcctggaaacccagacccgctggcgtgagacggtgctcgccctgttccgtcgccacgcccgcctgccagaagcgccgaaggccgggcaggagccgttggcggtggcccgtgcccgcgaactgctggcggcgcggttgctcgatccgccttcgctggaggaactggcggcggcggtcaatctgtccccgttccattttgcccgggtcttccgtcgcgccaccggcatgccgccccacgcctggctcaggcagcgccgcctggagcaggccagggcactgctcaagagcggccgggcgccgctggaggtggccctggagctgggcttcgccgaccagagccacctcggtcgccagttcaagcaggcctacggcgtggcaccgggtgaataccgctcggcctgcgcgcgctcgtccttgacgatctacgaataagtcaagctcacatttgcaaatcatttgtatttacgttctttacgatttgccgtaattttgcgccccactttttcctgcgtccctgggggagcctcgatgtcgtccgtgagttcgttgtcgcgcctggccgtcgccatcgcgctgggtgtgtccatgcaggcggcgcaggccgaagaggaagccaaggagctgggcacggtcaccgtggtcggcgactggctgggcgaagccgaccaggcggtggtgcagaaccatcccggtgcgcgcagcgtggtgcgtcgtcgggaaatgctcgagagcggtgcgcagaacgtccgcgacgtgctgcgcaaggtgcccggcgtgcaagtgcaggacaacaacggtaccggcggcagcgacatctccctgaacgtcggggtgcgtggcctgacttcacgcctgtcgccgcgctcgacggtgatgatcgacggcgtgccggcggcggtggcgccctacggccagccgcagctgtcgatgatgccgctgtccatcggcaacctggagagcatcgacgtcgtgcgcggcgccggctcggtgcgctacggcccgcagaacgtcggcggggtgatcaacttcgtgacccgggcgattccggagaagttctccggcgaaatcggcaccaccatcgagcatgccggccacggcggctggaagaagctcaaccaggcgttcctcggcgggaccgccgacaacggcctgggcgtggcgctgctgtattccggggtgaagggcgccgactaccgcgacggcaacaacgacaacgatatcgacgacgtgctgctcaagacccattggcagctcaccgacagcgaccagttggcggccaacttccactactacgacgcctacgccgatatgccgggcggcctgacccaggcgcagtacgacgacgatcccttccagtcggtacgcgactgggacaatttccgtggtcggcgcaaggacttctcgctgaagtacacccgccaggtcgacgacctcacccagttcgaggtgctcacctactacagcgacagtttccgcggcagcagcatcgccgcgcgcaacctcaggaccatcacctcgtacccgcgcgactaccatgtgttcgcggtggagccgcgggtctcgcggatcttcttcgccggcccgaccacccaggaggtcggcatcggctaccgctacctgaaggaagcgatgaacgagcgcgccagccagctggccctggtcgacaatgtgccgaccgtgcgtcccggctcggacggccatacctaccaggaccgtaccggcggtaccgaggccagcgccttctacatcgacgacaagatcgatgtcggcaactggaccatcacccccggcatccgcttcgagaagatcgacagcgactggcgcgaccgcccggtgctcggcctgaacggcaagccggtgcaggagaagaagcgcagcaaggactacaacgaaccgctgccggcgctgagcctgatgtatcacttgagcgacgagtggaagctgttcgccaactactccgaatcgttcggcagcctgcagtacttccagctcggccagggcggcagcggcaacgataccgccgccggcctggagccggagaaggccaagacctacgaactgggcacgcgctacgacaacggcagttggggtggcgagatcacgctgttctacatcgacttcgacgacgagctgcagtacgtcagcaacgacgtcggctggaccaacctcggcgccaccaagcaccagggcatcgagacttccggccactatgacttcgccgctctcgatccgcgcctggacggcctgtcggtctacggcagcctcacctatacccgtgccacctacgaaggcgacattccctccttcaaggggcgcgacctgccgctctactcgcgccaggtggccaccgccggggtgcgctacgaggtcgaccgctggacctacaacctcgacgccttcgcccagtccatgcagcgcgcgccagggctgagcaccgacagccagggcaacttcacccacaactacatcaccgagcccagcgccgacggccagtacggcgacattcccggctacgtgacctggaatgcccgcgtcggctacgacttcggcccgcaggcgtcgaacctgaagctcggactcggggtgaagaacctgttcgacaagcagtatttcacccgctccagcgacaacaattcgggaatctacgtgggtcagccgcgaacgctgttcatgcaggccagcgtcggtttctgaatattcggatgcgacttggcgcatcgtccgacgacaggcgtcctgcggcaacgcggacgcctgttctatgatgggcgcggaatttccatcggaacgctgtggcctgatccgcggtccatgcagtccaatcgatgacgggcttcctttcggcggccacgcaaggtaacaaggacgatgacccaacattcgcaattcgccctgctgggcaagcggcgtttcctgccgttcttcatcacccagctgctcggcgccttcaacgacaacatcttcaagcagtcgctgatcctcgccatcctctatcacctcagcgtcagcggcgaccgcagcctgctggtcaacctctgcgcgctgctgttcatcctgccgttcttcctgttctcggcactgggcggacagttcggcgagaagtacaacaaggacgcgctgatgcgcgcgctgaagctggccgaggtgggcatcatgctggtcggcgctgccggcttcgtcttcggcagcctgccgctgatgttcgtcgcgctgttcgccatgggcacccactcggcgctatttggcccggtgaagtattcgatcctgccccagcacctgcacgaggacgaactggtcggcggcaacgcgctggtggagatgggcaccttcctggcgatcctggccggcaccatcggcgccggcgtgctgatgtcccatgcgcattacgcggcggcggtggccaccgcggtggtgctggtggccgcctgcggctacctggccagccgcggcattccgcgagcggcggcggcgctgccggggttgaagctcgactggaacatcttcgcccagtcctggagcatcctccgcctggggctcggccagcgcccggcggtctcgcgctcgctggtgggcaactcctggttctggttcctcggcgcggtctacctgacgcagatcccgaccttcgccaaggaatggctgcacggcgacgaaagcgtggtgaccctgatcctcaccgtgttctcggtgggcatcgcgctgggctcgatgctgtgcgagaagctttccggtcgcaaggtggagatcggcctggtgccgttcggctcgatcggcctgaccgtcttcggcatcctcctctggtggcacgccggcggcattcccccaggcgaggcgccctacgactggctggcggtgctgcgccaccatgagacctgggcggtgctggccgacatcctgttcatcggcattttcggcggcttctacatcgtaccgctgtacgccctgatccaggcgcgcaccgacgaagacaagcgggcccgggtgatcgccgccaacaacatcctcaacgccctgttcatggtcgccgcggcgctggtctcgatcctcttcctcagcgtcgccaagctgtcgatcccacaactgttcctcgccctgtcgctgatgaacgtcgcggtgaacgtgtacatcttcaagatcgccccggagttcaccatgcgcttcctggtctggctgctcagccacaccatgtaccgggtccggcatgtgaacctggaggcgatcccggacgagggagcggcggtgctggtgtgcaaccacgtctcgtacgtggacgcgctgctgatcgccggctcgatccggcggccggtgcgcttcgtcatgtactacaggatcttctcgctgccggtgctcaacttcgtcttccgcaccgccggcgcggtgcccatagcggcgcgccacgaggacgaagggatctacgaacgcgccttccagcgcatcgccgactacctgagggacggggagctggtgtgcatcttccctgagggcaagctgaccgccgacggcgagatgaatgagttccgcgccgggatcgagcggatcatcgaggaaaccccggttccggtgatccccatggcgctgcagggtctgtggggcagcttcttcagccgcgacccgaacaagggcttcttccgccgcctgtggtcgcgggtaagcctggtggccggcgaatcggtggcgccggaggcggtggagcgcctcgacctgcaggcgcgggtgacgagcttgcgcggcgaagctcgctgatcgatccgcagaaacgaaaaagccccggcgatgccggggctttttttggcgaactacaagttagataacttgtacttcgtcggcttgcaggcctttctggccgttgacgaccacgaaggaaaccttctggccttcctgcaggctcttgaagccggtgccctggatggaacggaagtgaacgaacaggtcgttaccgctttccggggtgatgaagccgaagcctttggcgtcgttgaaccattttacggtgccgttctgacgattcgacatggtgtaactcctgaaacaaagttgattgcggcgacggaaatatccgagccggtaggtactgagttgcaaagagtacgaggagccgaggcgatgagcggaccgagatctaccacaccaggtcacgattcactgtgacccaagcaagcacagtggtcgcagagtacgcgataaaactgcggaaagcgatacccctcggagcatattcgatggatgtctaatggctcagcttgaggccgaccagtccgcagacgatcagcgcgacgctggccaggcgcagcaatgccatggattcgccgaacaggacgatcccggcgatgaccgtgccgaccgcgccgaccccggtccagacggcataggcggtgcccagcggcaggtgcttcatggccaggccgagcaggcccaggctgaccagcatggcgagcgccgtgaggaccgtgggaagcggcttgctgaagccttcggtgtatttcagaccaacggcccagcccgcttcgaacaggccggcgaaaaacaggatgatccaggacatggcgatctccagggcaacgggtggcggggccgtccccattcggtcaccggccggaggcgggtggtgaggtcgtcctcactgcgtgcggtattttgcatggttcatcggtcgggacaaggcttcccgaccgggatccagctcaacgcggcgtatcttccatgcgccggaacagggcggccagcagcgaaccggagagattgtgccagacgctgaacagcgcgctgggcaccgctgccaggggcgagaagtgggcgttggccagcgccgcgccgagccccgagttctgcatgccgacttcgatggccagggccttgcgctgcgccagcggcatgccggtcagcttgccggtgagatagccgagcaacaggccgaggccgttgtgcagcatcaccacggccatgatcagcaggccggactcggcgatccgcgcctggctggcggccaccaccgcggcgatgatcaccacgatgctgaataccgagaccagcggcagcacctccgccacctgccgggtgcgctcgccgagcaggcgctgtgccagcaggccgagggcgatgggcaccagcaccacctggaggatcgacaggaacatcgccgcgaacgacaccggcagccaggccgaagccagcagccagaccagcgccggcgtgaccagcggggcgagcagggtggtcaccgaggtgatcgccaccgacagggcgacatcgccacgggacagccaggtcatcacgttggaagcggtgccgccggggcagcagccgactaggatcacgcccaccgcgatctccgccggcaactgcaacaggcggcagagcagccaggccaggccgggcatgatgacgaactgggccagcacgccgatcagcacccgtatggggtgccgggcgacctcgcggaagtcttcgcccttgagcgtcaggcccatgccgaacatcaccaggccgagcagcggcgcgatggcgacggtgagcgggaggaaccaggccggccggaagaaggcgaggatggcgaacagcaggacccagaacgggaagctggcgctgacgaaacggctcagggcggtcagggcacgcatgggctttccttgttattggacggccgccagtctgccatgccgggcgcgactctcccagcggcgggcgccgccgggagagcggggcgtcagacgccctgggggatttcttcgccgccgagggcctcgaagagcgccggaaggaattcggcgaaggtcagcatcatcagggtgaagctggcatcgagctggccgagggcgtcttcgccgccgtccttttccgcctgctcctgcagcaggtcttcgaagcgcaggcgcttgaccgccagcttgtcgtcgaggacgaaggacagcttgtccgaccaggccagggacaactgggtgaccagcttgccggcggtgagatgcagctggatttcctcgctggtcaggtcctggcgcttgcagcggaccacgccgccatcctcgtgggtgtcgcgcagctcgcattcgtcgagcacgtggaagtcgccggcggcttcctgggtcttgacccagtcggtgagggtcgcggtcggcgcgaccttcacgctcagcgggcgtaccggcagggagccgagcgcttcgcgcagcgtcgagagcaggtcttcggccttcttcgcgctggccgagtcgaccaggatcaggccgaggcttggcgcgatcgcggcgaaggtgctggagcggcggatgaaggcgcgcggcagcagggtctggacgatctcgtccttcaactggtcgcgttccttcttgtagaccttgcgcatctgctgggcttcgatctcgtcgaccttttccttcagtgcgtcacgcacgacgctgcccggcaggatgcgctcttccttgcgtgccgagatcaggaagaagtcctggctgacgtgtaccagcggtgcgtccgggcctttgccgaacggcgcggtgaagccgtaggtggtcagctcctggctggcgcaggggcgggcgggtttttcgccgagggctttctcgagggaatcggcatccagttgcagatcctgggtgaggcggtagacgagcagattgcggaaccacatggggtcgttctctccgggcacaaaggacccattattccgccgctggcggctcaggccaaccccggtccgtcgctaactccttggaacggcagaaaatttttttcatcgaggggcttgccaggggccgaatcgctccgtagaatgcgccccacttcgagagtgaagggtgattagctcagctgggagagcatctgccttacaagcagagggtcggcggttcgatcccgtcatcacccaccaatctcgcaagttacgcgcagcggtagttcagtcggttagaataccggcctgtcacgccgggggtcgcgggttcgagtcccgtccgctgcgccatttccttccttcgctgtatctcttgcgcttccttcccgcttcataattcgacgtttttcgacgcttcctttccgctgttcttctgtcctcgttccacgcgttcgttctgctatctccttcatttttcggaaagttcggccttgaacttatccgcgcgcacctgttcctattgcccatagccactggtcgcgacagcctgctaagctcgcggcttcatcgaatatgcccgagcggcgaacagattaaaggactcagcatgaaacaacatcggttggcagcagcgatcgcactggtcggtctggttctctccggctgcgattcgcagaccaacgttgagttgaagaccccggcgcagaaagcttcctatggtatcggcctgaacatgggcaagagcctgtcccaggaaggcatggacgacctggattcgaaagccgtcgccaagggcatcgaagacgccctcggcaagaagaagcagcagctcaccgatgaagagctgaccgaagccttcgccttcctgcagaaacgtgccgaggagcgcatggccgccatcggcgacgaaaacgccaaggccggcaagaagttcctcgaggaaaacggcaagcgcgacggcgtgaccaccaccgcttccggcctccagtacgaaatcgtgaagaaggccgatggcccgcaaccgaaggccaccgacgtggtgaccgtccactacgaaggccgcctgaccgatggcaccgtcttcgacagctccatcgagcgcggcagcccgatcgacctgccggtcagcggcgtgatcccgggttgggtcgaagccctgcaactgatgcatgtcggcgagaagatcaagctgtacatccccagcgagctggcctacggcgcgcagagcccgagcccggcgatcccggccaactcggtactggtcttcgacatggaactgctcggcatcaaggatccgtccaagccggacgcggagcccgaggccggtgccgcagcgcagcccgaagccaaggcggacgcgaagaagtaattcttccgccgcgatgcatgaaacgccccgtccatgacggggcgttttcatttgcggattcggctgaacccaggcgctgccgcgagggtctgaaaaacaggtcgagggcacggccggtgttacccttatgcacacatttgtcgcacgtcgacccgacctacggtattgacctcgggttgtccgttgcgctaggtcaaacccttgattttcaatgcttttagagcattgtctaaaaagtgtccgatctgtcggaaagcctgtagcgacgggcttctcgccgacggaagggggggctgttcacaaggttatccacagtatgcgtggataacccggagagcctcggcggcaagcgcttgagcgaggtggaaggatggatgcaccacgaggattcagtcgttacctggggatcgcggaacgtttcctggcccgtggccgggtgcccgccttgttgattgcggtagcacgcaagcgctcgcgcctgaagctggtgaagagcgacctgcgcctgctgcaggaactgctggtggcctgggttcgcggcgaataccgcggactcagccgccaggcgttgctctcggtgatcgcggcgctggcctatttcctttcgccggtggatatcgtccccgacttcatcttcggtgtcggcctgctcgacgatctcgccgtcctggcctgggtagtgcgtcgctggcagtccgagctggatgccttcaaggtctggcgcgacgcccaggccgtcgagacgcagcaggcgctgcgagagctgccggctcccagggcggagcgcgttcagggttcctgaggggttcgcaggctgttttccagcaggcgctcgatgctgccgtccctgaccatctcgtcgagcacccggtccatactttcgacggggaccggcagttgtccgccatagatgcagtgcatccgatagctctgcagtaccagcggactgacgctcaggcccagctcgggatgctggcgcgtcaggtagagcagcgggcggcgcatgtccactgcggcgtccaggcgcgaacgcttgagcatctgcacgcgactggccaggtcgcgggtatcttcgcggcgaatttccccggcagcgaaggcctgcatgagatcgtccgcgtagacatagcctagacttgtacccagggtcttgccgcgcagctcggcgaagtcgcggatcgccggacggtcgtcgcgctgcagcaggacgtcctgctcttcgaagagggcaggagaccaatggtagcgttcgggtttgctatcccatccggggttggagttgcagatcacgtgaatatgtccgctggccatgaagccgtcgatccttcggttcggcgtttccacgaaacgcagcgacaatcccagccgctgcgcgacccgctcccccaactggcgggtgaagccgccttgcagctggtgatcgacgatgtccacgtagggcatgccgtcggcggggctgaagccccagcgcagctcgccggcgaaggcctgtccgactcccagcaggatgcacaaaccaagacttctccggcgcacccgtgggctcctccaccaggcagactgtgtgaccagggcagcagtatagccagtccgcagcggcgcggtgcctgataagatggcggcttgcaaggagaccgacatgaatgtccaagtgatcacgcgagacggcgaggcggaatacgcggtgttgccctgggccgaataccaggcgttgctggccgccgctggtcgcccggccgccagtgtcgcggtggagacgaccgcgccggcgccgccttccgcgagtctgctggagcgccgcgaggcgcgcggcctgagcctggaacaggtggcccgggaggtcggtatcagtccttcctacatggcgatgatcgaacgcggcgaacgcggcgaacgcgaggccagcgaggccatcctgttcgccctggagcgtgtgctgggcaaagcgacgggggcctgaccttgagtgtgctgatcagccgtaaacactgggatagcctgctgctggaaatcgaagatgcgcgtcgccagcgtcatctgctcacctaccgggcgctgatcgagcgcctgcaactgccgactccggcgatgaccaccctcaccgcggctctcgagcacctggcatcgctggatgcgcgctcggggcgtccgttgcgcagttcgctggtcatcagccagggcgcaagccgcttgccgcgcaccggtttcttcgagtgcgtggagcgcctcgggcgtttttccggtccgccggacggcccggccgcggctggctggcatgcggcggaagtggtccgtgtcttcgaattcgagtatcccgatgaactctgaatggatctggcgcctgcgcgcccgcctcggttacggcgtggcccggcagttgctgggctggccctggctggtcaagcagccgcgagcctggcagtggatgcaggggcagttctcgcgcatggccaacctcggacaccgcgacgcccaggcgttctacggtcacctgctgctgttccgtggacagggcttcggcgcgcgcgaggagggcctgcgcctgctgcgcctggctgccagcgcgggcgatgggaaagcggcctaccagctcggcgtgcaggcgctcaagggcgacagccggcaagcgcccgacgcgctggcagccagccgccactgggcactagcggcagaggcgggccacccgctggcggcgcgcaagctggcggaactctaccgcgatggaggcccgggcctggcgccggacagcgagcgcgccgagcactatgcgcaacgggcgtccgcgctcggtctatagctgaacgaacggttcaggcggcctcgatcaggtgcaggctgtagcctggcaccgccttggcctggcgcttggcctcggaggccagcgtcgccaggtgcgcggcatccattccctggcaggcttcggccggtagatgcaccacgccgacggacaatgacagcagcgggtactcctcgcgctggccatggcggttgtgcgcaacgaaacagccggcgtccaggtgctcgcggctgtagaagcgccggcattggctctggaaggtttccagcaaccggtcgatccgtgtgcgccagtcctcggggccgagcaccagcatgaagtcgtcgccgccgatgtggccgacgaagtcgctgcccgggtcgatccgttcgctcaggcactgtgccaggcacagcaggacctcgtcgccgcgggcgtagccgtagagatcgttgaagggtttgaagctgtcgatgtcgatgtagcagatcaccgcctcgcgcctttgttgcagcaggcgttcgaggcattgctggatcggcacgttgccgggaagcaaggtgagcggattggcgtgtcgcgcctgctggagcttttcctcggtgatcagcctgagcacgtcgatcacccggcccatgcccgcatagtgcccgccgcgggtgacgatgaaatcttcctcgatacgctggcgtgcgcggctggtcagcaggcggctgacctgctgcagggtctggccgagttccacggcgagaaaatcgtcgctcatcaggcggctgatcggcttgcgcaggaacaggtcgcaggcgaagggccggagcaaggcgtcggtgagcgcgtggcgatggacgatgccgatgggacgcccctcttcgtcgaggatcgccagggagttcaggttggcctggcggcggaagatttccaccacttcctgggtcgaggtgcgaacgtcgaccgcgcgctgttccagcagcagcgcacgcaggtcgccgtgctcgtcgctggaagactggctgggggcgccagcgctgggcagcatctgttgtacgtcgctcgccgggtgttcctgcgggcggccgaacagatagccttgcaccaggtcgatccccatctcgctaagcaccgccagttcctcgggcagttcgatgccttcggcgatgacctgggcgcgagaggctcgggccatcttcaggatggagccgacgaactcgcgtttcacggtgtccaggtggatgccgtcgacgaagtggcggtcgatcttcacgtagtctggacgcagttccgaccacaggcgcaggctggagtagccagcgccgaggtcgtcgagggcgatggagaagcccatggcgcgatagtggtgcagcgcggtgtcgagcaggtcgaagtcgtcgatgggggtctgttcggtcagttcgatcaccacccggttcggcgagatccccagctgttgcagcaattgcagggtgcggccgggcggatggccggcttcgaggagggactccggagagacgttgaggaacagcatggcgtcgccctggatgtcgcggaagcggctgaaggcgcgttgtcggcagagcagttccagttcgctcagccgtccgcattggcgggccacggcgaacaacgccaggggcgagtgcagcgggctgttggacggaccgcgggttagcgcttcgtagccgaccagacgccgttcggaaagcgagaggatgggctggaacaggcagtgcaggtcgccgtgggccaggatgctgtccagggcgctcaactgctcggtgacggtcatggaacgctctcgtcgcaatgaaaaagggccggttgtgcaaccggccccgtatttcacgacagtcccatgactgttttatgacgctcccgctgaactcagtgcttggccaccgccgagttgaggttcaggtagtccagcaggatgtgcccggactcggtgaggtaggcgtcgtcctgcggcttggtcttgtcgtcctcttccggcagggcgttctcgtcctcgcgcttgagttccttcagcggctcctggcccttggacttgcgcagggcgttctccatggccaactggcggttctcgatgctggtctgctgggcgcggcgcttggcctcgttcaggctgacggtcttctccttcatcagctcctgggccagcgccaggcgctcgcgggcgtagacgaagtcggcgttgttctcggtgcgcgcgtcgtgctgggccttgagttgcgcgaggaacggcttgaacgggttggcctcgtccttcaccaccgggcggatggtgtcccagggcatcgagtcgggcagggcgctttcgccgatttccttgtcgtcgacgatggacgggtagctgatgtccgggatcacgccctggtgctgggtgctctgcccggagactcggtagaacttcgccagggtcagcttcagttcgccgtggttgagcggctggatggtctgcacggtgcccttgccgaaggtctgtccaccgaggatcagcgcgcggtggtagtcctgcatggcgccggcgaagatctccgaggcggaggccgagagacggttgaccagcaccgccagcgggccggtatagaaggccttgccttcgtcgtcgttgagcacgtcgacgcggccgtcgctgttgcgcaccagcacggtcgggccctggtcgatgaacaggccggtcagctcggtggcttcctgcagggagccgccgccgttgttgcgcaggtcgaggacgatgccgtcgaccttgtccttctgcaattcggcgaccagcttcttcacgtcgcgggtggtgctcttgtagttcgggtcgccggcgcggtaggccttgaagtccaggtagaaggccggcaggtcgatcacgccgagcttgtagctgcggccttcgtggtcgaccttgatgatggatttcttcgccgcctggtcctccagcttcaccgcctcgcgggtgatggcgacgatcttgctggtctggtcgttcggcgcgttgctcgccggaatcacttccaggcgtacctgggagcctttcggcccacggatcagcttgaccacttcatccaggcgccagccgaccacgtcgaccatttcgcccttgccctgggcgacgccgatgatcttgtcggaggtggcgatctgcttgctcttcgccgccgggccggccggcaccaggcgtacgaccttgacgtagtcgttgtcgctctgcagcaccgcgccgatgccttccagcgagaggctcatgttgatgtcgaagttttccgcgttgtccggcgacaggtactgggtgtgcggatcgtaggactgggcgaaggcgttgatgtaggcctggaagatgtcttcgctgcgggtctgcttcaggcgcgacagctggttcttgtagcgcttggtgagctgttcctggatcgccttgtcgtccttgccggtgatcttcaggcgcaggacctcgtccttcaccttcttgcgccagaggtcgtcgagctctgcggtgtccttcgcccagggggccttctcgcggtcgatcagcaggctctcgtcgacgctgaagtcgatcttgtcgacgcccttgtcgagcatcgccagggcgtagtcgagacggcctttcaggcggtcgaggtgacgcttgtagatgacgaagccgggatcgagatcgccgctcttgaggaagtcgtcgaacctgttgcgccagcgatcgaactcggcgatgtcgccggcggtgaagtacatccgcgccggatcgagcatcttcaggtagctgtcgtagatcttggccgagcgttcatcgttcagcggcggcttgttgtagtggtgccgcttgagcagctccaccacgttgaggctggcgatgacctgctcgcggtccggctgcaggctgtcccaggaattctgggcgctgccgacggagacggcggtcgaggcgaacagcggcagcgaactggcgccgaggaggagcaacagggcggtacggggcagaaaacgcttcatgctgattcgactgatcgcggagtaatgacgcatattaggccttattagccggcgccgggttcccttggcgcaatgcaaaaagcccgactctgggtgatcgggccgtgacaaccccactatggaggcagcgtgaacgcattgcaaggtatcgaaggtcgtgtcgagtggtcggaaatcgccgccccgtcctgcggtcagggcgaaatccgcatccgcgtggcggccgccggactcaaccgcgccgacctgttgcagaaggccgggctctacccgccgccacccggcgccagcccggcgctggggctcgagtgtgcgggtgtggtcagcgaggtgggcgcgggcagcacctggcaggtcggcgaccgggtctgcgcgctgctcgccggcggcggcatggccgaggaagtggtggtggacgcgcgccacgtactgccggtcccggcagggctgagcctggcggaggcggcggggattccggaggtctacgccacggcctggctgaacctgttccaactggcggcgttgcagcccggcgagaaagtgctgctgcacgccggcgccagcggcgtcggttcggccggcatccaactgtgcaaggcgttcggcaacccctgctgggtcagcgtcggttctgccgaacgcctggcctactgcgaatccctgggcgccgccggtggcgcgctgcgcaagcagagcctggaatcgctgcgcgatttcgccccgttcgacgtgatcctcgacccggtcggtgcccgctatgccgggttgaacctggagctgctgcggagcgacgggcgctgggtgatcatcggcctgatgggcggccgcgaggcgcaactggacctggcacaactgctaggcaagcgtatccagttgaccggctcgaccctgcgtacccgcgataccgagttcaaggcgcagttgatcgccgagctggggttgaaggtctggccattgttctccgccgggaaactccgtgcgcagctggagcgaaccttcccgatcggcgacgccgaggcggcgttcgaggcgctggcgagcaaccaggtgcagggcaaggtcgtgctggtggtggacccatcgctggcctgaggagccgcttcggcaccgtcgaggcgatggaaagcgcgatccgctcgcgctttcgcggcgagcctgtcagcgccaggcgttgaccggccagcccatttccttggcgtaggcgagcagggtcgggtccggattgaccgtgttcggatggccgaccagcttcagcagcggcaggtcgttgcgcgagtccgaatagaaccaggcgtcggccagttggcgatcgtctccttccagcaggtcgagcagacgcaataccttgccttcgcgataggtgagggtgccgagggtgcggccggtgtagtgtccgtcgagcacttcgagatcgatggcgaggacttcgtcgacgccgatccgcgccgcgatcggcttgaccaggtgcaccccggatgcggagacgatcagcacccggtcgttggcgctgcggtggcgcgccaggcaggcgcaggcgtcgctgtagatcagcggctcgatgacctcctcgacgtaggcctccacttcccgctcgacttcctcgacgctgcgaccgatcagcggttgcagggtgtagtccatgtacaggtccatggacagcttgccttcggcgtactgctccatcagttcggcgtcgcggcggacgaaggattcgtcgacccagccgagactcgccatgcgctggctccacaggctggagcagtcgccgtggatcatggtctcgtccaggtcgaagatcaccaggctcatcaagctacctctcgaatactgttgcgatcgatgaccagcgtcagctgactgccggccggatacaggcggtctgcgctgcggttgaggacgtcgacggtgagttccaccccggcggcctcgacgcggtaacggatcacgttgccgagcagactgtgcgagcgtaccagcgccggcacgccttcgctcggttcgttgcccaggcgcagggattccgggcggatcgccacctggtgcgcgcagggctggccgagcaggcggctggcctgttcggcgtcgagcaggttgtagttgccgatgaagccggcggcgaaggcgttttccggcgcggtgtagagggtctccgcgtcgccgctctggacgatgcgtccggcgttcatcaggacgatgcggtcggacagggtcagcgcttcttcctgatcatgggtgacgaacaccgtggtcagccccagctcctgctggatgcggcggatctgttcgcgcaggtgcttgcggatgcgcgcgtcgagggccgacagcggctcgtcgagcagcagcaggcgcgggcgcgtcaccagcgagcgggccagcgccacccgctggcactggccgccggagagctggtgcgggtagcgtgcggcgtactcgcccagttccaccagttcgatggcttcggcgacccgctgcttcagttccgccgccggcaccttctgcatgcgcaggccgaaggcgacgttctgttgcacggtcatgttggggaacagcgcgtagctctggaacaccatggcgatcccgcgcttctgcggcggcaaaggcaccacatcctcgccgtcgatgaggatgcgcccgctgtcgacctcggtcagcccggcgatgcaacgcagcagggtggacttgccgcagccgctggggccgagcagggtgacgaactcgccgcgggcggcggcgaagtcgatatcgcggaagatgctggtggcaccgtagctcttgtcgagctgttcgacgctgacgaacgacatgatcaggccttgtccttgttcagtcggttggccgcccaggtcaggaccaggacgaacacgaagtaggagaccaccactgcgctggtgtagtggccgctgctgttgcgcatgttgttgaggaacacctgcagggtctcgtagcgggtaccgaccagcaggttggcgaagacgaattcgccgatgaggaaggagaacgacagcagcagggccaccatcacgcccttgcgcaggttcggcagcacgaccagcagcgccgccttccaggtgctggcgccgagcaggtgggcggcgtccatcaggtcgcgcaggttgatcgcctgcaggttgttggtgatcgcccggtacatgaacggcagggcgatggtgaagtagcagccgaccagcacccagggcgtgccgatcatttccagcggcccgctggcatagagttgcagcaggcccaccgaggagacgatcggcggcaccgcgaagggcagcaggatgagcacgttcatcacgccgtccaggcgcgggaagtggtagtggatgacgaacatcagcggcaggatcagcaacacgctgaacgccagggcgccgaagcagaccagcagcgagcgggcgaaggccagcaggaagcgctggtcgctccacagcgtcaggtaccacttcagggtcaggccgtccggcagcagggtcgccgaccactgggtggccagcgagtagagcagggtcgccgccagcggcaggaccaggatcaggaacagcgcgcagaccaccaggcgatggtagagcgcggcaggacgtcgatcagcgcgcgacatggtagctcctgcgcagcagccattggtggaccagggtgatcagggtcatcaggccgaccagcaccatggccagcgcgctggccatgttcgggtcggggaacacgtcgccggcgaccagcgcgccgatgcggatcgggatcacgttgaagttgccggtggtcagcgagtacaccgtggcgtaggcgccgagggcattggccaggaggatgacgaaggtgcccagcagtgccggggtcagcaccgggatgccgatgtgtcgccaatactgccagccgttggcgccgagcagcgcggcggactcgcgccagtcctcgcgcagggcgtcgaaggccgggtagagcagcatcaccccgagggggatctggaaataggtgtagaggattatcaggccggtcttcgagtagagattgaagtcgtcgatccagccggcctgcttgagcaacagggtcagcgcgccgttgaagccgagcaggatgatgaaggcgaacgccagcggtaccccggcgaagttgctggtcatgttggagaaggccatgacgaagtcgcgcaggcggctgtcgacgtggcgcagcgaatggctgccgagcaccgcgatgagcaggccgagcaggctcgaccagccggcgatctccaggctatggtggatcgcctggcggtagaagggcgagccgaacagctcgaggtagttggccaggctccaggcatcgctggccttcaggctgttcagcgcgacccaggccagcggcgctatctggaaaatcacgaagaacgccgcgaagggcagcaggaacagcagcgccagccatttgccggagagtcgtttcatggggcgagcagctcccggcagacgggtttgtcgtgggcggcgccgaggatttcgcagagcgtgccgcagaggtcggtctgcagcggttgcgccaggtcgttgcggctgaaggcgtcgccgaagacgaacagcggcacctcgcgctcctcctcgaggatgccgccgtggctgcggtcctcgttcattccatgatcggcggtgatcgccacctggtagccggccgccagccactggtgcaggtattccgacagcagcgcgtcggcgcgccgcgcggcgttgcggtaggcggggctggcgaggccgtgcctgtgcccggcgtcgtcgatgttcatcgagtggaccagcatgaagttcggtgcgtgccggcggcgcaggctttccgcatcggcgaacaggtgcgagtccggatagtggtcgttccagtagaagtgtccgcgctggatcggcagtgcgctgtcgtcggtgtggcggtcgcgggccgggtcgaacggcgcgcggttgtacagttcgctgacccagtggtaggccgctgccgcggtactcaggccggccgcgcgggcatagtggaacaggctctgttcctggctcaggcggaccacgtcgttgtgcaggatgccgctatcgatcggcggcactccggtgaggatgcattcgtagagcggccgggacagcgaaggcaactcgcattccaggcggtacgactggccgcggccggcgccgcagagggcctggagatgccccatgcagtcgcgggcgacgctgtggttgaggccgtccagcaggacgaggatgacgtcgtggcgcattcggggtatccgtcgatgcggggcggccgccggcgagggcggccgcgctccgcgtcactgcatgtttatgatcaccgcttcctgccactgccgcggcaggcgcttggaggtttcctcccaggccttggcgtccttgatcggctgggccttggcgtactgctcgttgggcagcagttgggccttcacgtcgtccggcagggtcaggctctcggcgcggatcggtcgcgcgttgcccttggccaggttgatctgtccggcgtcgctgaagatgtactcgcgggcgagcttggcggcgttcgggtgcttggcgtacttgttgatgatggtggtgtagccggagatcaccgagccgtccgaggggatcagcacctcgaagcgctccgggtcgatctgctggcggtagctgaggccgttgaaatcccagacgatgccgacttcgacctcgcccttttccagggtggcgatcaccgggttggtcagcgacaggcggccctgcttggcgatcttgccgaagaactccaggcccggcttgatgttcttctcgtcgccgccgttggcgatggccgcggcgagcaccccattgaccgcctgcgcggcagcgctgacgtcgccgatggtgaccttgtacttgccctgcagcaggtcggcccagctgtgcggtacgtccttcaccagttgtttgttgacgatgaaggcgatggtcccggtgtaggcgagcgcccagtggccgtcctggtccttggcccaggccgggatctgttcccaggtgctcggcttgtacggctggctgacgccctgctgcacggcgatggggccgaaggcggcgccgacgtcgccgatgtcggcgctggcgttgtccttctcggccttgaacttggccagctcctgggccgaactcatgtcggtatccatgtgcttgagcccatacttgctctcaaggtccttccaggtgtccttccagttcgcccagctgtcgggcatgccgacgctgttgacctggccttccttgcgcgcggcctgttccagcgcctgcaggtccgcttcggcggccaacgccaggccgctgccgagggcgatggcggttcccagcaatgaagcaagcatgcgtttcattcggtgctccttcgttcgagaggttcggtcgggcagcctcggagttctcgacgctccttcgggcgggactgccgcgggtgtggtctagatcagcaagacccaggccaatctagagccgctggatgacggtttcatgtcagctagccgcgcctggcatcgccgcggcttgcatccgcagaagcgtagaccatgcttaagccctcgattccatgggcgtcgggcgcttccgggaagaccgctgtcttgtgcctgtcacgtcccggtcatctgggtttcttagcatcggacgagccggaggcgcagggcgggccggtggaagtgcccctggctggggctggactagaccaataaggaagcagtcgatgcgtgacgaagcgctacccaccgtaacggcgatctgccgggcgctcagcgagcagatcggccatggtctgctgccggcgggtggcaagctgccggccgagcgcaagctcagcgagctgttcgcgacgacccggatcaccctgcgcgaggcgctgatccagctggagtcgcagggcctgatctaccgcgaggagcgccgcggctggttcgtctcccccgagcggctggcctataacccgctggtccgcagccacttccatgcgatggtcagcgaacagggccgggtgccggcgaccgaggttctgtcggcccggcagatgccggcgagcgcggcggtctgcgagctgctggagctgccggcgctgtccagcgtctaccagatccgccgggcgcggcgggtggacgggcggctggtgctgtatgtcgagcactacctgaacgcgcagtacttccccggaatcctcggccacgacctgacccgctcgctgaccgaactctatgccagcgagtacggcatccactatgggcgggtgcgtttcgacatggtgcccactgcactgcatgccgaggctgcggcgccgctgaaggtggcggtgggcagcccggccctgcgcatcagccggatcaaccgcgaccagcgtggtcggctgatcgactgcgacctggagttttggcgccacgacgccatccatatcagcgtagaggtaccgcagtaacgccacgcgtcgacgacctgcggcaccttctgcgaggatgggctcccgggaaaaggagccctcgcatgttcatactgccgatttcgtccgacctgcacctggagctgctcgaccagccgcgcgccgaggaactgttccgccaggtgcgcgccaacagcgagcacctggcgccctggatgccgtgggtgccactgacgcagagcgcggacgatacccgccgtttcattggtgaaggccagcggttgtgggcggagcgcaggagttgccgctgcgggatcgtcgaatccggatgcctggtcggcgtcatcgacctgcacgatttcaccgaggacagccgcagcgccagcatcggctactggctggcggcgtccgcgcaagggcgcgggctgctcgccagggcgctggggaagacgatcgagctgggtttccttggctacgaccggcagcgcctggtgatccgctgttccaccgagaacctgcgcagccagcgcgccgctgagcgccagggcttccggcgcgacggagtgatccgggccaacgagatcatcgccgggcgtgcccacgaccatgcgatctacacgctgttgcgcagcgaatggcacgctgcgcacgcctgagtggccccgggcgaatgcccggagcgtgagcgaggctggtgctcagggcagctcgctgctggcgtagaaggcgccgagcaccttgaccaggtgcgccaggtcatggctgccggccagctcgcgaatcgagtgcatggcgaaggtcggcaggcctatgtcgacggtgcgcacgccgacctggctggcggtgatcgggccgatggtcgagccgcatcccatgtcgctgcgggtcacgaagctctgcaccggcacttcgctgtcctgacagaggtggcggaagaagccggcggtttcgctgttggtggcatagcgctggttgctgttgatcttgatcaccggaccgccgttcagcgccgggccatggttggcgtcgtgcttgtcggcgtagttcgggtgtacgccatgggcgttgtcggccgagaccagcagcgagcgctggatcgcccggctgaaggcgtcgccttccggcagcaggcggcgcagtacctgttcgaggaacggaccgtcggcgccgcaatgcgaacaggaaccgacttcctcgtggtcggtgcagaccaggatgcagttctcgtcgccttcggcgttgagcagggcttccaggccggcgtggcaggacagcaggttgtccaggcgcgccccggcgatgaactcgtcgttgaggcctaccaccgcggcggactgggtgtcgtagaacgacagctcgtagtccagtaccacgtcggcggtgatgccgtgctcgcgcagcagctgttcgtcgagcagcaggcggaagtcggcggcctcgcccggcgccagttgggcgatgatcggcggcagttcgttctgcgcgttgatcggccaaccctcgttggcggcgcggttgagatggatggccaggttggggatgaccgcgatggccttgcggaagtcgaccaggcggctttccagcttgccattggcgcggaaggtgacgcgcccggccagtgacaggtcgcggtcgaaccaaggggcgaagagggcgccgccatagacttcgacgccgagctggaggaagccgttgcgagcgatctccgggttcggcttgacccgcaggcaggggctgtcggtgtgcgcgccgaccaggcggaagccgctttccaggggcgagcgacggcccaggcggatggcgatcagcgacgagtcgttacgggtcacgtagtagcggccgccggcttcggtgtgccaggcgtcgcgctcgtcgaggcggcggtagccggcggcttccaggcggcgggcgaggctggcggtagcatggaaaggcgtgggcgaggccttgaggaaatcgatcaggccctggttgagttctgcgcgcatagtggctccggacggcaatccatgcagtctatcgtattgtccgacggggttcaggtcgttggcggcggggccggccagaaaaagcggaagctggtcgttgtatggcaagacggggtaccggaaatcggcgggcggcgtcccggcgggccgggacgcggcggggaaggctcagaacggcgccggcgactcgaagcgcaggcgttcgccgctctgcggatgggtcaggcacagcaggctggcgtgcaggcacaggcgttcgtgggcggcgagggcttcggggttggcgtagaggcggtcgccgagcagcggatggccgatggagagcatgtgcacgcgcaactggtgcgaacggccggtgatcggcgtcagctcgaccctgctccagcgttcatgacgctcgatcacacgccagaaggtcagggcgtggcggccgtgctcgaagtccaccacgtgacgcggcttggtcggcgggtcgtagcgcagcggcagttcgatgcgcccgctgtccagttccggcaggccccagcaaagggcggtataggctttctcggtctcgcggtcgtggaactggcgggacagctcgcggtggctgtcggcgtcgcgggcgagcaccatcaggccggaggtttcccagtccaggcggtggacgatgcgggcctcgggatagccgttttcctgcaggcgggtgaccaggcagtccttgttgtcatcggcgcggccgggcaccgacagcagcagggtgggcttgtcgaccaccagcagggcgtcatcctggtgaacgattcggatctgggacagcggcatagcgaacgggctcatcgccgggaggcggcagggagcctggcgggcaggctcggtgaaacgactgcggcggccaatggccgccgcagtatggaccctgggcgaatcaacgatccggcagggtgatgttgagttccaggatcgagcagttgccctggttctccagttccacctggatctgctcctggtcgatcggtacgtacttgcggatcacttccagcaggtctttctgcaactggggcagataatccggctgtgcgcgctggccacgttcgtgggcaacgatgatctgcagtcgttctttcgcgatggaagcgctgttctgcgatttccgactgcgaaagaagtctaaaaggctcattcacgtcctccgaacagtctttgcaggaatcctttcttctgcacatcgaggaatcgatgcggtatttccttgccgagcaggcggtcgaccgcatcgctgtacgcctggccggcgtcgctctgctcgtcgaggatcaccggcacgccctggttcgacgccttgagcacggcctgggattccgggatcaccccgagcaggcggatggcgaggatctcctcgacgtcgtcgacgccgagcatctcgcccttggtgacgcgctccgggttgtagcgggtcagcagcaggtgttccttgatcggctcctcgcctttctcggcgcgctgcgacttgcttgccagcaggccgagcatgcggtcggagtcgcgtaccgaggaaacctcggggttggtcacgacgatcgcttcgtcggcgaagtacatggccaggtgggcgcctttctcgatgcccgccggggagtcgcagatgatgtattcgaaatccttgcgcagttcggccatgactttctcgacgccttccttggtcagggcgtccttgtcgcgggtctggctggcggccaggacatgcaggttttcgaggcgcttgtccttgatcagggcctgggtgagggtggcctcgccgttgacgacgttgacgaagtcgtacaccacgcggcgttcgcagcccatgataaggtcgaggttacgcaggccgacgtcgaagtcgacgatgacggtcttgaaaccgcgcaaggccaggccggtgccgatagctgcgctggtggtggttttaccgacgccacccttaccggaagtgactacgagaattttggccaaggtgattcaccccaatgaaaaacgtaagaattctggtccctgaaagtggcggcagtatccgttaaaggcgggtgatgttcaacacgtcacccgacaggctgacgtgcactgccttgccccactgcgggctgcgtcgcaggtcctccgcgaccttgtagttaccggcgatggagaccagttcggcggccagctgctggcagaagattcgcgccgtggcgtcgcctttcacgccggccagtgcgcgtccgcgcatcgggccgtacacatggatgtttccgtcggcgagaagttccgcgccgggactgaccgcggccagcacgatcaggtcgccgccggcggcgtagatctgcatgccgccgcgcaccggggtcttcaccaccttggtcgggcggctgacgggctcggcgggcttctcttccgccttggccggctcgggcctggcttcaccggcgctcgggctgggctcttcggcaggcttgcgcggggcgctgtccttgatgtccagcggtcgttcgcgggcgcccgagggcggcagcaccggcaggtccagggcctgggcggcggcgatgtcctcctcgcgcccggcgcggatcgccagggtgcgcaggccgtggcggcgacagacctcgaggagcgccggcaggtcgaggcggccttcgccttcgggcagcttgtcgagggccatgaccaggggggtgtcgcggaagaagttgggcgcttgcgccactttgtcggcgagttgccgttcgagcctcgccaggtcgttgtgcgccagttcgaggatggtcaccgcgagcatgctgcccttgagctggaatacggggtcttgatcgaggaggtcggcttggctcatggggcttgtcggtcgttgaattgcagggacttataacgagaacgccggatgcccgcaagcgtggcagatagccggggcggcatcgatcggcaacgcggcgtcccgccgggacggcgggcagggtagaatggcgggctttgatcgtcgtcggaaccgtccatggatcgcccccgtttctccagcgctttcctccatccccgctactggccgctctggttcggcctgggactgctctggctggtggtgcagttgccgtatcccgtcctgctgatgctcggccgtggcctgggggcgctgatgtaccgcttggtcggctcgcgccgcgagattgccgcgcgcaacctcgaactgtgctttccggaaaagtcgcccgccgaacgcgagcgtctgctgaaggagaacttcgcctccagcggcatcgccttcttcgagatggccatgagctggtggtggccgaaggcgcgcctggcccgtcttgcccatatagaaggcctggagcatctgcgcgaggcccaggcgcagggcgagggggtgatcctcatggccctgcatttcaccaccctggagatcggcgcggcgctgctcggccaggtgcacaccatcgacggcatgtaccgtgagcacgacaacccggtgttcgactacgtccagcgccgtggccgcgagcggcacaacctcgatgccaccgccatcgagcgcgaggacgtgcgctcgatgctcaaggtgctgcgtggcggccgcgccatctggtacgcaccggaccaggactacggcgccaagcagagcctgttcgtgccgctgttcggcatcccggcggccaccgtcaccgccaccaccaagttcgcccgcctgggccgggcgcgggtgttgccgttcacccagagccgcctggccgatggcagcggttatcgcctgaccatccacccgccgctggaggacttccccggcgagagcgaggaagccgattgcctgcggatcaaccagtgggtcgagcgctgcgtgcgccagcagcccgagcagtacctgtgggcgcaccggcgtttcaagacccgcccgccaggcgaagccaagctctatccgaaacggcgcaagcgctgaggacgggcattccggacgcgcgcggggtctggctatactcgccgcagttcatgacggaagccccgctgtgtccgatccccttgccccacgtccgccgctcaccggcctgatcctttccgggggcggcgcccgcgcggcctaccaggtcggtgtcctggccgccatcgccgacctgctgccggacagcgccggcaatcctttcccggtcatcgtcggtacctccgccggcgccatcaacgccgttggcctggcttgcggcgccctgcaattccgccaggcgatccagcgcctgaccgcggtctggcagggattccgcaccgaacatgtctatcgcagcgactggccgggcgtgacccgccaggcctcgcgcttcctcggccatagcctgctcggcctggggcggcgggtgccggtggcgttgctggacaaccggccgttgcatgagctgctggcacgtgagctggatttttccgggattcatgcggcggtgcgccagcgccagttgcgcgcggtggcggtgaccgcgttcggctacgagtcggggcaggcggtgaccttctaccaggggcgcgcgaccatcgatccctgggtacgccatcggcgcctgggcattcccacccgcctggagcttcggcacctgctggccagcgcggcgatcccgctgctgttcccgccggtgcggatcaaccgcgaatacttcggcgacggcgcggtgcgttcccaggcgcccatcagcccggcgttgcacctgggcgccacgcgggtgctggtgatcggcgtcagcggcaacccggccaccggtggcgacagtgccatgaccggcctgccgccgtccgaccgaccgccgagcctggcgcagatcggcgcccacctgttgaacagcaccttcatcgacagcctggaaggcgacatcgagcagttgcagcggatgaaccagatcggccagttggtggcgccggaggtgcgccgccaggcgggtgggctggagccggtggaggtattgctggtgtcgccgagccggccgctggacgagatcgccgcgcggcactaccgggagctgtcgcgggtgctgcggcttttcctgcgcggtcccggagcgacccgcgccagcggggcgggggtattgagctacctgttgttcgagcgcggctattgcagcgaactgatcgaactgggctaccacgatgcgatgggcaagcgggcggaactggagcgcttcctgcggatcgagcggtaaaccttattcaggacgggacaggcggaaggaaaaaaccgccccgaagggcggctcgcgcacggctcagacggccaggacaccgtcgcgatagtcgcgtagcgcctgctcgatttcctcgcggctgttcatcacgaacggaccgtactggacgatcggctcgcgcaacggcttgccggcgagcaccagtacccgggcgccggcttcgctgcgcaggctcagttccccttcttcggacagccgagccaggcgattggtggcgatttccaccgggcgttcgccttccaccgtcaggctgccttcgtagacgtacagcagaacgcgatggccgtccggcaggcgcggggcgatgcggccgccggcaggcagttgcaggtcgtagtagtgcggctcggtgtccggcctttccacggcgccgatctgctgcgcctggccgtcgtcgaagcgaccggcgatcaccgtgaccttcacgcctccggcggtttccaggcgcggcacgtcttccggctcgatatcgcgatagccggccggggccagcttgttcttcgccggcaggttgacccacagctggaagccacgcatcgcgccttccacctgttccggcatctcgctgtggatgatgccgtgggcggcggtcatccactgtacgccgccgggcttgagcaggccgcgattgccgaggtggtcttcgtggcgcatacgcccttcgagcatgtaggtcacggtctcgaagccgcggtgcgggtgcgaagggaaaccggcgacatagtcgtccgggttctgggtatcgaactggtcgagcatcaggaacgggtcgaagcgttccggggacgggccgccgatcacgcgggtcaggcggacgccggcgccatcggaggcggggtggccggtatgcagttcgaggacatcacggtagcgggtcatgggaacctcctggttcgtgtatggctcgatgatagtcctctacgatcgatatatggatgcgagttttatgtgattcctatcgatttattgaatcgttctgaggaaaagaaaccgccgcatagggcggcggttcttcgtctcactcggcgatctgcagcttgcgcgcctcggtatagatgtagcgcagtttctcgtactcgaacggcgagttcatctggccgtagcggaagctggtgttgtagcgcttgtccaccacgcgcagggcggtgatctccgggtggtcgccgctggcctggggaacgttgaggtagttcacctggtattcgccgacgtagtccaccaccagtccgccggtgtcgcgcaggttggacgggccgaggatcggcagcaccaggtaggggccgctgcccacgccgtagaagccgagggtctggccgaaatcctcgctgcgcttgtgcaggcccatcctagtcgcagggtcccacaggccgagcacaccgaaggtggtgttgaacagcagccgcgcggtggtttccatcgccgccttgcccttcaattgggcgaggttgttcagcagattgggcacgtcgccgaggttgtcgaagaaattgctcacgccgctgcggacgaagtgcggggtgacgtattcgtagcctcgtaccacgggcaggaacacccactcgtcgaagcgatagttgaagtggtagacccggcggttccaggattcccagggatcgtacatgttcagtgcgtcgagggtggcgcgctcgaattcgcgttgatccaggccgggattgaacttgagttggtccagtggacggctgaaaccgtcgccgtcgagctggcgtggcggcagttcggccggcgcggcggcctcgtcggcctgggcgctggcggcagcgctcagcagaagggcgaacatccagtgtgcggttcggctcatcgatcagtttcctgcctgctgggtgagggccgcgctggcgacctgggtctgtccggcagcgggcgtggcgaagaagtccagcatgtcctgcgcgttgaccttgtagttgaggttgccgcagtgaccgccatagggatagacggtcaggcgttcgccgaaggtccggcggaggaagccgaggtcgcccgggccgaggatgacgtcgtcggcgttgtgcatcacggcgatcttcgggctgtcgtgcagatagtcctgcagcttgtagaggctgacctggttgaccagttgggtcaggctgccgccgtcgtaacgggctcgccacatcgggatcagttgctcggtcatgtagcactcgaagtcgcactgtagcgcgcgcttgaagaagggctccaggctggtgccttcgttgatcgggtagttcggcggggtgatcaggccgcgacggttgaccaggtccgaggtgaaggcgatgtcggcggcggagaagcggaacgaggtgccgatcagcatggccatttcttcgttgctcaggcgttgcttcgactgctggaagtcgtagagcatggcgtcgttgatgtcgacgtagcctttctgccggaagtagcgggtcagcttgctcagcaccacctcgtagaaggtgcgcgagtcagtgatgcccttgacctgggtttccaccagtttgtcgaggttgctcaccgaggtgtagaggttcaccggtgggttgagcagcagcactttcttgaagttgaagctccggcggctttcgtcgaggtggctgacgaacgcggcgttcagcgcccccaggctatagccggtgaggtaatagtcggtcaccggcaggtcgcgctgctgcgcgcgcaccgcctgcatcacccggtacaggtcatcggcgtcgtcgctggaaaagcccggtgtggcgaagcgcgaggcgctggccatgaagtcccaactggtcggcgaggacaactgcaccacgtggtagccggcctggtagaagagcttcttcaggtattccgggaagctgctggcgtagtgggcgccagtcccggcaatgatgaagatcagcggcgccgcatgatcctggcgggccaggcggtagcgcagcttcttcaccggccagaagttgtccggcagggcgaactcgcgctccgggcgcaatttcaggctgtagtccttctggtcgatgtcctcgctgtgcggaagctcgggacgcagttccggcggcgtggtggcgatggtcgcctcgaacgggttggtcagtggatagccgtagctcgcggcgtccacgtcccgggcctgcgccagattggcacaaccgagggcgaggccgccgagcagggcagcgaaacggaggaagtggggcatcgggggaatcccttcgagggaaaagtactgagtgaatatactgccgctatgacaactgcaagcctcagtagtgcagtgggttattgcagccagcgttccaatcggtctttcccgcctcttgccgtgcctcgcgaatatcccttcaggcgtggcggtgcagccagccatgggcgctagccgggcgcggcgcgccgtctttctcgaagcgtttccagatcttctcgtggaagtagaaaccgaccgagttgcacagcggctcgaccgccgccaccagcccgccgaccgctatgctgccggtcagcgcataggccacgctgaaggcgatgatgaagtgcatgacggtgaaggtcagggtcttgagcatggctgctctcctttgatcgagaatcattcctctttggcgaaagcctatccaggcgctcggccaagcggaaatcggcctgtccaatcgagtgcatagagcgcttcgatcgcactgtctcggagcacatccgcagcgtgccgcagcgcagttcgaggcatgtcgttatcgggtgcgatgggtgtcgttctcagagcagtccgccgtccgggcgcgccgatgatggacggcggcaccgcagagtgccgcgaccgccggggagcgtccccgtcggcatagaacaaggggtacgtctgatgcgaatgatgcgacgactgttgtgctggagtgcgggcctggcaatgtcggcggctgtggggatggcggccgcggcggacaagccggtgatcaccatcggttacgtggacggctggtcggacagcgtggcgaccacccatgtggccgccgaggtgatccgcgagaagctcggctacgaggtgaagctgatgccggtggcggcggggatcatgtggcagggcgtggcgcgcggcaagctcgatgccatgctctcggcctggctgccgggcacccacggcgcctactacgagaagatgaaggataaggtggtcaaccttgccatcaactacccggacgcacgcatcggcctgatcgtccccgaatacgtgagcgccaacagcatcgccgacctccaggcgcagaaggacgctttcggcggccgcgtggtgggtatcgatgccggcgccggggtgatgatcaagaccgacgaggcgatcaagcaatatggcctcgactacaagctggtggccagttccggcagcggcatgatcgccgagctgacccgtgccgagaacgagaagaagccggtggtggtgaccggctggattccgcactggatgttcgccaagtggaagctgaagttcctcgacgatccgaagaaggtctatggcgataccgagcatgtcgacaccgtcgccaacccggcgctggaggccaaggccaagccggtctgggagtttctgaagaagttcggctggaaggatggcaacgaggtcggccaggtgatgctggcgatccaggagggcgccaaacccgaggatgcggcgaagcagtgggtggcggccaacccgggacgggtcaaggactgggtgcagtagcacggctggttcgatcggggaacgccgtgcccgggcaaccgggcacggcgtttttccttgccgaaggctggctccggaatctgccggaaggcccgggaataccggtctagagcggctggcgaaacgctacgactaaagtcgtctggagcgcttgcaccagcgtcctacagtggatatcgacgacattccgcgtcaccccgctgtgaggataaaaacaatgaacgacagcatctaccagcggattgataccaatccgcgcttcaaggagttggtggccaagcgagagcgtttcgcctggatactttcttcgatcatgcttggcctctacgtgatattcatcctgctgatcgctttccagccgcagctgctgggcgcgcgtatcagtcccgattcgtccgtgacctggggcatcccgatgggtgtcggactgatccttgccgcgttcatcctgaccggcctgtacgtgcgtcgcgccaacggcgagttcgacagcctgaaccaggaaatcctcaaggaggcgcagcaatgatcgctcgtctccttgccgcgctcggccttgcggccttcgctccggccctctgggccgactcgctgaccggcgacgtgcagcgccagccgctgaacgtctcggccatcgtcatgttcgtcgccttcgtcggcgcgaccctctgcatcacctactgggcatccaagcgcaaccgctcggcggccgactactatgccgcaggcggccgcatcaccggcttccagaatggcctggcgatcgccggcgactacatgtcggcggcatccttcctgggtatttcggcgctggtcttcacttccggctacgacggcctgatctactcgatcggcttcctggtcggctggccgatcatcctcttcctcatcgccgagcgcctgcgcaacctgggcaagtacaccttcgccgacgtcgcctcctaccgcctcaagcagaagcagatccgcaccctgtcggcctgcggctcgctggtggtggtggcgttctacctgatcgcgcagatggtcggcgccggcaagctgatcgagctgctgttcggcctcaactaccatgtcgcggtggtcctggtgggcatcctgatggtgctctacgtgctgttcggcggcatgctggcgaccacctgggtgcagatcatcaaggccgtgctgttgctctccggcgcctcgttcatggcgatcatggtgctcaagcacgtcaacttcgacgtcagcacgctgttctccgaagccatcaaggtgcatccgaagggcgaggcgatcatgagtccgggcggcctggtcaaggatccgatctcggcattctccctgggcttcgcgctgatgttcggcaccgccgggctgccgcacatcctgatgcgcttcttcaccgtcagcgacgccaaggaagcgcgcaagagcgtgttctacgccaccggtttcatcggctacttctacatcctgaccttcatcatcggtttcggcgcgatcctgctggtcagcaccaacccggacttcaaggacgccaccggtgcgctgatcggcggcaacaacatggcggcggtgcacctggccgacgcggtgggcggcagcctgttcctcggcttcatctcggcggtggccttcgccaccatcctcgcggtggtcgccgggctgaccctggccggggcctcggccgtctcccatgacctgtacgccagcgtgttcaagggcggcaaggccaacgagaaggacgagctgcgggtctcgaagatgaccaccgtggccctgggcgtggtcgccatcgtgctcggcatcctcttcgagaagcagaacatcgccttcatggtcggcctggccttctccatcgccgccagctgcaacttcccggtgctgctgctctccatgtactggaagaagctgaccacccgcggcgccatgatcggcggctggatgggcctgatcaccgcggtgggcctgatggtcctcggcccgaccatctgggtgcagatcctcggccacgagaaagccatctacccgtacgagtacccggcgctgttctcgatgatcgtcgccttcgtcggtatctggttcttctccatcaccgacaagtcggcggcggccgacgaggagcgggcgcgcttcttcccgcagttcatccgttcccagaccggcctgggcgcctctggcgcggtggcccactaagcgctacgtgaagacgtagcccgaggcggcggccggatttccggtccgccgcctttcgtttcagcgtcccggttacagcgagatgagccatgcctgacagtttcaacttcgcctcgccgcccttcgaccagttgcgtccccatcagcgcgagaccctcaagcaggccctcagcgtaggctactacgcgccgggggaaaccttgctggaggccggttcggcggtccccgggctgttcgtcctgctcaagggcgtggtcgaggagcgcggcgacgacgggcgagtgttcgcccagtacgccgcggacgacctgttcgacgtccgcgggctgttttccggcagcagcaagcatcgctacctggcgatcgaggaaagcatcgtctacgaactgccggccagttgcttccaccagttgtgcggggagaacccggatttcgcccggttcttccaggccgacctggcggccaagcgccagttggcccagcgcgacgggcagaaccttgccgagttcatccttacccgcatcgcccgcgagcacttgctgccggcgctggaggtggaggcctcgctgtccctcggcgacgccgcgcgcctgcaattgagccacggcgccgatgccctgctggtgcggctggagagggacgggcccgagctcggcatcgtcacccgcaccgacctcatgagcgcgcacttccgcgacgggcgcagcgagctggaggctatcgggccgttggcccatggtccgctggccagcgtcgaactgggcgatttcctgttcgacgcgatgatcctcatgacgcgccagcgtatcgagcgggtcgcggtcacggaggacggtcaggtgatcggcctgttgcacctgacccaggtgctcagcctgttctccacccattcccacgtcctggcgctgcgcatcgcccgcgccgacggcctcggcgacctgcgccgctgcgcggaaaccctggacaccctgatcgctaccctggccggcaacggtatccgcctgcgcttcatcatgcagctggtcagcgcgctcaacgagcaattgctcgaacggcttttcgaattgttgctgccgccaaccctgcgcgggcgctgctgcttgctggtgatgggcagcgaaggacgcggcgagcagttgctgaagaccgaccaggacaatgccctggtcctagccgacgatctgccgcaggaacaggccctggcgatgatgcagcgcttcagcgcggccttgctggagttcggttatccgccctgtcccggaggggtaatggccagtcggccggaatggtgcaagccgctggcggcctggcaggcggagctgcgcgggacgctgctggagggcaagccggagcagctgttgcgcctgtcgatcctggccgatgcctggccggtggccggcaacctgcagctgttcgagccgttgcgtcggcaactgcgcggtttcgccgacggcggcgagcgctggctggcggatatcgcggcggcggccctgcaattcgatacgccgctgaccttcctcggccagctgaaaacccaggacgcccgcctcgatctcaagcgcggcgggatcttccccatcgtccacggcatccgcaccctggccctgcgcgaaggcctggagacccgcgggaccctggcacggatcgaggcgctgaagcgacacaaggtcctcgaagcacgcctggcggacgacctgagcgagtctttcgagctgttcctgcaactgcgcctgacccgccagttggccggccaacgcgacggtcgccagcagggcctggacgtcagcggcatgagccgccacgatcgcgacatgctgcgctacggcctgcatgtggtgaagaagttcaagcagagcgtggcccgtcaattccacctggagacccgatgaacaccatggtcaagttgcccgacagccgctggccgggctggcgccgccggctgtattggtggatgcacgaggcggtcgaggcggaggaagtgatctccctcgatctcgagaccaccagcctcgacccgcgtcgtgccgacatcctcagcatcggcgcggtgctggtgcggcgcggcaaactggtcatgggcgagcgcctggaactctacgtcgagccgccgccgagcctggatgcggagtcgatccgcatccacaagctgcgccgcgccgacctggagggacagttgcagctggagcaggccctgcgccaggtgctggcgttcatcggcgaccgaccgctgctgggctactatctgtcgttcgatgtcgccgtgctgaaccggcacctgcgccagctcctcgaccgacagttgcacaacccctccatcgagatttcgtcgctgtaccaccggaaggtcagccggcattttcccgacgcacacatcgacctgcgcttcgacaccctggcgcgggccctggatgtgccggtcagcggtcgccacaccgccctcggcgacgcccaggcggtggcgctgatgttcatgcgtctgctcaaggggccggcgcccaaggtcatccactgaggctggaggtcgcggatttattgaatcttcgttgctcggcgggggtcgagaactacaagggcggaatctcccgccctttgccccatgagccgaacaggagcgacgcccatgagtctcggtacgattcttctgatcatcctgatcctgctgctgatcggcggcctgccggtctttcctcattcgcgcaactggggctacgggccctcggggatcatcggcgcattgctggtggtgctgttggtcctgttgctgctgggcatgatctagggcccgatcgggaatgccgtcgcggcgggtatcggcggataacgcctccggcgttattcgccctacgcggagggttcccagctttcgctccgccgttgcggcggggtatcggcggataacgccgttggcgttatgcgctctacgtaggatggatcgaagccttcgcttggtgaagggcggtttcatcgcgggtccgccgggcgctttttttccatcgaccggcttcacttgccttgcgtctcgcgccagactggcgcgcatgccgatccagacgcttgccacccttgccgatatcgacgccgccgagtgggacgccttgctgcctcccgcccagccattcctgcgtcatgctttcctgtccgcgctggaagacagccacagcgtgacgcccgctaccggctggcgcccggctcatcgcgtgctgcgcgatccgcaagggcggctgtgcgcggcgctgccggcctatgtgaaggcgcactcgtacggcgaatacgtgttcgactggagctgggccgacgcctgccagcgggccggtatccgctactacccgaagctgctggtaggggtgcccttcaccccggtcgccggtgcgcgcctgctgggcgagggcgaagggttgcagaggctgctcgcgtcccttggcgaggaggccgaggcgagcggtctgtcgagcatccatgtgaatttcaccgacgcccgggcggacaccttgcttgccgcgcgtgacggttggctcgaacgcctgggttgccagtaccactggcacaaccgcggctatcgggacttccaggacttcctcgaggccctcagttcgcgcaagcgcaagcaactgcgcaaggagcgcgaacaggtcggcggacagggcatcgagttcgaatggcgggaaggcggccagttgtccgaactggagtgggatttcgtctatctctgctacgccaacacctacctggtgcgcgaccgcgatccctacctgagccgcgagttcttcggcctgctggccgagcgcatgccggaggcgatccgcgtggtcttcgcccaccagcgtggcaagccggtggcgatggcgttcagcctggtcgctggagataccctgtacgggcgctactggggatgcctggccgagttcgaccggctgcacttcgagacctgcttctaccagggcctggaattcgccatcggcgccggcctggcgcgcttcgacgccggcgcccagggcgaacacaagctgatccgcggtttcgagccggtgctgacgcgctcctggcactacctggcgcatcccggtctgcgcgatgccgtggcgcagttcctcgaacaggagcgggcgggtgtgcgcgcctacgccgaggaggcccacggcctgttgccctaccgccaggcctgaagggggccggaacgatagggcgtggcgtccgctcagccgttgctggtgctgccgccccattcgaggaagcggatcttgtgcagctcgccgctatggtcctcgtagaccacggtcaccggcactacgccggtcctggtcgaattgtcggtacggtgcaggacattcttcacgtccagttgcatgccgtagtggtattcctcgaccggcaggccgcggcccgggtccttgtccacgtcctgggcgaaggccatgggggcgaggctggtgatgacggcggacacgacagaggcaagtttcattctgtgattctccgtagcgatggggcgaaatccccggtaccgagcactggcatccttggtcgtccgtggccgacgccaggtggacggggacgatgcggcaggcgtcgggatcgagccggggcacgggttcgataagaacaccgtttcgctggcggaaaaaatcgaagcgcgtgctagtcgagatcgacggcggtgatgattgccgcgaaaaggcccgttgcagagcctttgacaaggtcacccaggccgggcggcgcgagccgccgcccggtgccgaggcttcagtcgacgccgacgaagccgccggtctggtgttgccagaggcgcgcatagaggccgccatgggcgagcaactcggcatgcgtgccgctttcggcgatgtggcccttgtccagcaccaccaggcggtccatgcgcgcaatggtcgacaggcggtgggcgatggcgatcaccgtcttgccctgcatcagggtctccaggctttcctggatcgccgattcgacttccgagtccagcgccgaggtcgcttcgtcgaggatcaggatcggcgcgtccttgagcagcacccgggcgatggcgatgcgctggcgctggccgccggagagcttcactccgcgttcgccgacatgggcgtcgaagccgcggcggccctcggcgtcgctgagcagcgggatgaactcgtcggcgcgagccttgcgcaccgcttccatgagttccgcgtcgctggcgccggggcggccgtagagcaggttgtcgcggatcgagcggtgcaacagcgaggtgtcctgggtgaccatgccgatctgcgcgcgcaggctttcctgggtcaccccggcgatgtcctggccatcgaccaggatgcgtccgctctccaggtcgtacaggcgcagcagcaggttgaccagggtcgacttgccggcgccggaaggtccgaccaggccgatcttctcgccgggccggaccttcaggtcgagaccctggatcacgccgctgcccttgccgtagtggaaggcgatgtgctcgaactccacctcgccgcgctctacccgcagcggctgggcgtcctcgcggtcgaccaccttgcgcggcagggcgatggtctgcatgccatcctggacctggccgatgttctcgaagatgccgccgaccacccacatgatccagccggacatgttgttgatgcggatcaccagcccggtggccagggcgatggcgcccaccgagatcagctcctggctccacagccacagggccaggccggtggtgccggtgatcagcacgccgttcatcaccgtgatggtcacgtccatggaggtcactacgcgcccggcgcgttgcgacttgagggtctggtcgccgatcgcttcgcgggcgtagtcctcttcctggcgggtgtgggcgaacagcttcagcgtggtgatgttggtgtagccgtcgacgatccgccccatcagcttcgagcgcgaatccgaggcctccaccgagcggcgcttgacctggggaacgaagtaggcgagggcgccgacgtaggcgaacacccacagcaccagagggatcatcaggcgccagtcggcctcggcgaacagcaccagggcgctgacggtatagatcagcacgtgccagagggcgtccaccacctgcaccgccgaatcgcgcaacgagttgccggtctgcatgatgcgctgggcgatgcgcccggcgaaatcgttctggaagaagccgaggctctgcttgagcacgtagcggtggttctgccagcggatcaggttggtcatgctcgggttgatgctctggtgcaccagcatgtcgtgcagggcgttgaacagcgggcgcaggaccagcgccaccaccgccatccagatcagttcgttggcgtgcacgcggaagaactccgcgctgggcgtgctctgggcgagatcgacgatgcggccgaggtagctgaacagcgccacctcgatcagcgcgacgatcaggccgaccaccagcagggccaggaacaccggccagacctggcgcaggaagtagacatagaaacgcagcacttcgctgggcggcatgcgttcggaagcactgcggaacgggtcgatcagacgttcgaaacgacgataaagcatgatggctctcttctggagcgggcccgtcctgggcccgccggatcaagcccctgcggctggactcagaggcgtttggcggacaggatcaccacgtcgtcgctcggcacgtcggcgaagccgttgcggcgggtggtgggaaccttggcgatctggtcgaccacgcccataccacgcaccaccttgccgaacacggcatagccgaagtcgcgggcaccatggttgaggaagtcgttgtcggtcaggttgatgaagaactggctggtggccgaatcgaccactccggtacgggccatggcgagggtgccgcgctcgttgagcaggccgttgtcggcctcgttcttgatcggtgcacgggtcttcttctcctgcatgccggcgctgaagccgccggtctgcaccatgaagcccgggatcacgcggtggaacagggtgccgtcgtagtagccgctgtcgacgtactcgaggaagttcttcacgctgatcggcgccttggccggatcgagttctacctcgatctcgccgaggctggtggcgatcaggacgtgcggcttggcggcaggcgtggcggccagcagggaaccggcgaagagcagggtgcaggcggcgatcaggagacgtttgagcatggttgttccttggttttatcgatatcggcgaggaagccgagcagggtggtgttgaaaatctcgggttggtccatcggcgtggcgtggcgggagtcctccaccaccaccaggcgggcgtcggcgatccgctcgcaataggcctgcttcagcgataccggcgtgtagtcgcgatccgcgctgatcaccagggtcggacaggcgatctcggccaatcgttcctgcacgccccagccgatgatcgcgtcgaggctggccaggtaggcgcgcttgtcgttctccgcccagcgcgcctcgatcttctctcgcagcccggcctgttccgccttgggaaacaacagccggccgagggcgcggccgatgatccgcaggctgagcaggcgcgagaggagcttgcgcttggccacctccagatgttcgcgaggcttgcgcgggatgacttccggagtgctgttgacgatggtcaggctgcgcagcaggtcggggcggtcgcaggccaactggaagccgatcatcccgcccatgctgatgccgaccaggtgcaccgggccgcagccgagccggtcgagcagcgccgcgcagtcctcggcgaagccggccatgctgtagccgccgcgcggcttgccggagcggccgtggccacgcaggtccgggaccagcaggcggtagtggcccagcagggccggcaactggtattcccagtcgcgggcgctcgaaccgagaccgtgcagcagcaggaccggcgcgcgctcggtgggaccggggtggtcgtcgtagacgagggtgcagtcgcggtgctggaagtcaggcatctgcgttcactcggcggccggttcgggcgccgcgaagggcgcgttgagcggtacgttggcgaacgacttgagcatttccatgaggatctggctggccgggccgagcggcttctccttgttggtgtagaggtagaagcggctctgccgcacgccgccctggctcagcggcagcggcttgagttggccgctctgcagttcgcgctcgatgatgtgtcgcggcagccaggcgaagcccaggccgttgccgacgaaggtcgccgcggtagccaggctgcccaccgtccagcgctgttcggcgccgagccagccgtggtcgcgcggctgtagccggccgctgtcgcggatcaccacctgcatctgggtttccaggtcctggtgggtcagttcgcgttgcaggcggtgcagcggatggtcggggtgggccacggcgacgaactcgaccacgctgaggtcggcgccgaggtggccgggaatgatcaggccgctgatcgccaggtcggcggcgccctggatcagcgcttcctcgacgccggagagcacttcctcgcgcagcagcacgcgacagccgcggctctgcggcatgaaggcggacagcgagcggacgatccgcgcggtggggtaggcggcgtccaccaccagacgcacctcgggctcccagccctgttccatgtggtgggccagttcctccagttgcccggcctgcttgaccagttgccgcgagcggcgcagcagcacttcgccggcctcggtcagcaccgccttgcgtccgtcgatgcgcagcagcggcacgccgagctgttcctgcatgcgcgccacggtatagctgatcgacgattgcgagcggtgcagggcttccgcggcctgggcgaagccgccgtggtcgaccaccgcctgcagggtccgccattggtccagggttacgcgtggcgctttcatttccgcctcctcgaatgcagggatgcctcgccggcgtttccgcggccggcaggcgatgacgagtgcgccggaggggcgacttcgcttatcgtgtcgtcggcgtcctgtacggggtagctgtccattctcttgacgtacgggatgtcgtggttttcagggtgttgccatttttccatctgtcgctaccgggagtccggccatgaaaaggctttgctgtttcgcactatcgctgctgcccctgtccgctttcgcctatccgatcgaggtcgacccgcaactcaacggcaccgaggtctcctacagcacccaggacatcggtcgcgacatgggcgccatcctcctcaccaacctgggtggccaggcggcggaatgcacggcggtgttccgcaacggcccggagaccccgaaagtgcgcaagggcgtgatccagcccgggcagaacagcaacttcaccgcgcagttcggccgcgacatcatcaagttgcggatcaagctgacctgcaagatcgcgaaatagagcgttctctcaccgaaagactaggtgttgcctgtttataaatcaatatggtcgatatttaacagcggttttttcaactttttaatcgattaatcattctctaccctcacctccatcgttgtatcgcagtgggtggaggtcgagtcatgtcccgtgtcctggttatcgagagcagtgcccgccaacggggctcggtttcccgcctgctgacggcggaattcatctcccactggaaagccgcgcatcccgctgatcgcttccaggtccgcgacctggcgcgcgagccgctgccgcacctcgatgaattattgctgggagcctggaccaccccctgcgatggccatagcgctgcggaaaggcgcgccctcgagcgttccaatcgcctgaccgaggagttgcggatagcggacgtgctggtgctggcggcgccgatgtacaacttcgccattcccagcagcctgaagagctggttcgaccatgtgctgcgcgccggcctgaccttccgttacgccgagcaggggccggaaggcctgctacagggcaagcgcgccttcgttctcaccgcccgcggcggaatctacgccggcggcggtctcgaccaccaggaaccctatctgcgccaggtgctgggcttcgtcggcatccacgacgtcaccttcatccacgcggagggcatgaacatgggcccggagttccgtgagaaaggcctggcgcgagcccgcgagcggatgctacaggcgctggaaacgaacacttccctttgcgtccctctgccaacgctccggtgattggacgcagcacccggtcgaaccccttccccccgcgtgttcgaccgggtttttttattccctgcggactttcgatggttgccggtgtgacggccggggcggattcaggcgcgctcgggatcgcctcattcgtcgccgactgcggttttcctgccccgtgcaccgaggcgcgccgacagcacgatggcgaggatgatcagggcaccgccgaggaacatccgcggccccggcgtctcatggaacagcagccaggcgaaggcgatcccgtagaccggctccagggcgaataccagtgccgcggtgcgggccttgaccaccgccaggctggccacgaacaggctgtgcgccaggccggtgcagaagacgcccagcagggccagccagagccagtcgagagcgggtagcaccggtagttcgccgaccgcgaatggcagcaggcacagggtgactaccaggttctgccagagcgccgcctgcaccgggccgacctgcccgctgttgctacggttggccagcgacagcagggcgaacagcaggccggaaaggatcgcccagagcaggccgagggtggcgccgctggcgaggtcgaagttcggcgtgaccagcaccaggccaaggctgaccaggaccaccagcagtccttccgcgagatgaatgcgctcgcggaagagcagcccttcgaggattaccgtgaaggccgggaagctggcgaagccgagggtggcgatggccacgccggcggtcttcacggcgatgaagaaactcacccagtggccggccaggagcaggccgcagagcgccaggcgcagccattgcgcgggtcccagggcgcgccaggcctggcccgcgaggcgggcgaagaggccgagggcgagcaccgcgaacagcgcacgaccgaacacgatcaccccgggggaggcgctggccagcttgccgaacaccccggtcaggccgaagaggagggcgccgccgtgcagggcggcgagggcggaacgtcgattcatggggatccttcaggccaggcgcgcaccgttgggcaggggcttgtcgaagccggccaggaccaccttgtcctcgctatcgtagaccccggtgaccaggacctccgagcgcaccccggcgatctgcttcggagcgaagttgcagacgcagaggacctggcgtccgaccagttgctcggcctggtagtgtgcggtcagttgcgcgctggaggtgcgcaggccgagcggtccgaggtcgacctcgaggacataggcgggtttgcgtgccttggggttgggagcggcgctgaggatggtgccgacgcgcagttcgacgcgttcgaaatcctgccattcgatgatgtccatgctgactcctgttctgtcgatgggcagagagtaaggagtcgtgacggatttgtctgtcgtgcggctagccggttttgtcgcgggactcgcgacgcagttgtcgcggggtgacgccgaactcgcggaccagcgctgcggtgaaggcgctctgcgaggcgtagccgacccgggcggcgatctcgcccaccgccaggctgctctccagcaacagttcgtgggcctggtgcaggcgtcggctgcgcgcgtagtccatgggcgtctgtccggtctcggcgaggaacaggctgtggaagcgcgccaccgaaagaccggccagccgcgccaggtcggctacctgtagcggatgggcggcatggcggtcgaggtaggcgtcgaggctggccagtggcaggcggggctgctggcgcggcggctggcgctcgctggccaggctggcgaggagcaggccggcgccctggtgggcgatcaccgggtcgttgatcgggccgctggccagccagttcaccagttggccctgggcgggtgtcagcgacagcgcctgcggtcgctcgaacagccgccgaccggcttcggcgtgttcgcccaggcccagcagcaggctgccgtcgcagggcaggtcgaggaccaggcagcggctgccggcgggactcgagcaggcatgccgggcttgcgccggcaccaccgcgaaggtctgccgcaacacgcggctgccgcgcccctcgacctcgaactcgaggcagccgctgaggcccaggaccaattgggcatggtcatggctgtggacgatctggtcgtggctgtagtggcgcagggaaaggatcgaacccatggcgaagctcccggaggcaggcgcccagtctacccgctggcgccggcgacagacagtcgcgccctgtcacgcaacggtcgccggcctgtcacagtcgtttcaccggcgccgtccaagatcggaaaaacaccgtcggagacccgccgatgagcaccgcgcaacgcttcacctcgaaccgcaagcagcgggttcggaccctgtggatctcggatgtccacctggggacgcgggattgccaggccgaacacctggcggcgttcctcaagcgctaccacgccgatcgcatctacctggtgggcgacatcatcgacggctggaagctgcgcggcggcatctactggccgcaggcgcacaccaacgtgatccgccgcctgctcaccctgagcaagcgcggcaccgaggtgatctacgtcaccggcaaccatgacgaattcctgcgccgctattcgagcctgatcctcggcaacatccgcctggtcgacgaggcggtgcacagtaccgccgacggccgcaagctgctggtgatacacggcgaccagttcgacgtgatcacccgctaccaccgctggctggcgttcctcggcgactccgcctacgagttcaccctgctcctcaaccgttggctgaaccactggcggcggcgctggggctacggctactggtcgctgtcggcgtacctcaagcacaaggtcaagaccgcggtgaacttcatcagcgacttcgaggaagccatcgcccacgagtgtcacaagcgcgggctcgacggggtggtctgcgggcacatccaccatgccgagatccgccgcatcgagggcgtcgactacctcaactgcggcgactgggtagaatcctgcacggcgctgatcgaacattgggacggcagcatccagctctaccgcctggccgaggagcaggcgcggctggcggcgcaggccgcggcggtcgagccggcggcatgaggctattgatcgtcagcgacgcctggttaccgcaagtcaacggagtcgtcaccagcctgctggccctgcagcgcgagctggaactgctgggccaccaggtacgggtgctgtcgcccgccgacttccgctgcctgccctgtcccagctatccggaaatccccctggcctggaatctctggcgcctcggcgggctgatcgaggccttcgccccggatgccgtgcacctggccaccgaggggccgctcggctgggccgcgcggcgctggctgggcaagcgcggcctggacttcacctcggcgatccatacgcgttttcccgaatacctgcgtgaccgctgtccgtggctgccgctgtcctggggctatgccttcctgcgcgccttccatcggccgagccgggcggtgctggtgagcaccccgcgcctgcgcgacgagttctgcgcctggcgcttccagcacctgcggctgtggcgcaagggcgtcgataccgaactgttccatcccgccgagacacccgcggcggaagagcggccgccggtgttcctgtatgtcgggcggctggcgacggaaaagaacctggaggcgttcctcgatctcgaactgccgggcgaaaaatggctggtgggcgacggcccgcagcgggcggcgctggagcagcgctatccacaggcgcgttttctcggctaccgccatggccgcgcactggccgacgcctaccgggcggcctcggtgctggtgtttccctcgctgaccgatacctatggcctggtgatgctcgaagccctggcctgcggcgtgccggtggcggccttcgccgtgccggggccgctggatgtattgcagcagggcgtgaccggggtcatgcacgaggatcttggcgaagcctgccgccaggcgctggcgctggatcgccaggtctgcgggcgctgggcgcgggagcagtcctggcgggtttcggcggaggagttcctggcgctgcaggcgagcggtccgcggactgcgccggaatggcgcgacgaactgccggcggcgttcgacgaacttagaggatgaccttgtcgcgcaggcgttcggcggcctgttgcagggcctggatgacccgttccttgtcgtagttctggatgttgttggtgtccaggtacatggagaagccgggcaattcgtgctcgacgtagctgggcgcggcgccgaggtcgcggcgcgagtccaccacctggtagatctgcaccgggcggctgaagcccttgaccgcgatctggcccttgtcgcggcacatgatcacgtccttgatcagcgagtaggtctcgtgggaaatgaggatttcgccggcttccgaggcgctttccaggcggctggcgaggttcacctcgcggccgatgatggtgtagtccatgcgcgtgtcggcgccgaagttacccaccgtgcaatagccggtgttgatgcccatgcggatttccagcggcttggtgatgccctgggcccgccactgctggcgcagcaccttcatgtgcttgcgcatggcgatgcccatcgataccgcagccaccgcgtccttcttcgcgccctgggtgctggggtcgccgaagaacaccatgacgcagtcgccgacgaacttgtcgatggtaccgccgtacttgagggcgatcttcgacatttcgttgaggtagttgttgagcaggtcggtcagggcctcggcttccagttcctcggatagctcggtgaagccgcggatgtcggagaagaacacggtgagcttcttgcgctgggtttccaggcgcacgctcttcttgccgctgaagatcatttcccagacctgcggcgacaggtacttggccaggttgcgcgcgagccgcgcggccttttcctgctcgcgggcgatctcctggcgcacctgggccaggcgcaggccctgctggtggccgaagaaggcggtgatgcagatgtacagtccgcagaacaggatgctgaccgcggccacctcgaccggggtattgcccagcagcggcggggcgacgagcacggcgaccagcagggcgctgctggccgataccagcaaggccatgccgagcaggcgcaggccgccgatgaccagcgcggtgaagctcagcaccagcaggaacatcaggctgggcaccacggagaagccgagcagcgccatgcccaggccacagtgcacggcgtcgaccgcgagcagggcgcgggtcaccttgcgcgggtcgtgctggcggaagcgctggccgaggtggtacgccaggtgcgggtagagcagcgcatagggcaccatccagaggatgccgtagctgaaatactgggtgtaggttcccgccgcgatgctggcgccacaggcgatataggccagcacgcgcgaatagtattcacgcatggacgcgacggaccggctcgtcggcgagcggtcggggagggtaggcttcatgcgctggagaggatccctgtgtattttcgtcccggctcggcctcgtgagctttccgcctggggaatggcgggtggccaggttgctggcggaatcttaaccaagcgtttgcgcggcggccagtgacagctgatcgatagttcaggaaagcgcgccgatccgggaccgacggtcgtcacgggggagcgaccggcccgggggccagccgcgcggatgggtcagaagcggatgcggccggtgaaagcgtccttgagcatcacccagtcgcccatgaacgaccacagcgggtacttgaaggtggccgggcggttcttctcgaagacgaagtggccgacccaggcgaagccgtagcccaccagcggcagcgccagcagccatagccactgctggctggccacggcgtggaagagcaccgccagcaccagcaggctgccgacgtagtgcaggcggcggcacaccgcgttgctgtgttcctgcaggtagtaggggtagaactcggcgaaactgtggaaacgctcgtcatcagggctgctcatggaatgcctcctctcgttgtgtccgcgcagtgtagtgcgggccgcacgatgtcgcggatgacatacagggccagtttagtatccttgggccgccaggccggacgacggtcggcgtgcctcccgccagaacaagaagagaccgatgccggaacgtacaaccttgtccagctgggtccagggcatcgtcctcgccctggagctggaaggcctcgacggacgccagctgttcgccgagctgggcctcgactaccaggccttgcaggaccccgacgcgcgcttcccgcaggacgccatgagccgtctgtggcagcgtgcggtggcgctcagcggcaacccggcgatcgccctgaacatcgcccgggtccggcgcccggctttccacgtcgtcggctatgcgctgatgtcgagccgcaacctggcggaaggcttcgcgcgcctggagcgctaccagcggatcatcgcggaagcgtccgacctgactttccgccgcacgccgcagggctatcgaatcggcgtcacggtgcatggcgatcgcctgccggcgccaccgcagagtgccgaatgctcgctggcctacctggtggacatggtccgctggatcaccggccggtcgctggacccgctggcggtggagctgcccggcgcgccccgcgagccgctggcaccctatgtcgatctgttccgcgcgccgctgcgctttcacgccgaggagttcgcgctggtgttttcccgcgtcgacctcgagacgccgctaccctcggccaacgaggcgctggcccagttgcacgatcgcttcgccggcgaatacctggcgcgtttcagtaccagccgcattacccatctgacccggcagaccttgtgccggctgctgccgcagggagaacccaagcgcgaacgggtggcccaggcgctgcacctgtcgcagcgcaccttgcaacggcgcctccaggaagaaggcaccagctaccagcaactgctcgacgacacgcgccgggatatggccgaacagtatctccagcagcccggcctgaccttgctggaagtcgcctacctgctgggtttcgccgatccgagcaatttcttccgggcattccgccgctggttcggctgcacgcccaacgaataccgggcgcgccgccaggagcgcccgggctagtcgccaggccaggcgggacgcttcagggctgcacggcgggttgcgccgaggcctggcgtagggtccagtcgagaacctgggccgacagcgtatcgccggccttgccgaaggcgctgaccaccgccgcgaccttcttgccatccaccggctggctgacctcgaaacgccggctggcgaccacgcgcttgtcgtcggtacgcaccaggcgcgcgtcgtagcggatcagcgcgctggcctggccgttcgggtactcggtctggaaggcgcgaaggtcgccgcccagttcgaaatcggcctgcaggttgctgtcgtcgctgctcaggccgcggacccggccgtcggcctggaacgcctgcatcagacgatcgcgcagcagcgacggcgccggatcgctccagcgcgcgccctggtacacgctgatttcgtcgccgtgcgggcgcaccgcgatgcgcgggctctccagcaccaggctggtacgcggccgggcgatccgcagcgaccagtcgaccggccgcgcggcggcgctggccggagggttgtgcaccggtagcaggtagacctggaggacctgcgcctccggcaggatcgagcaggcgccgagggtggcgagcgcggccaggccggcggccagggacaggcgacgcagcgggcgaagggcgagcctcatggggtgaactccttggttttttcccggcccagcaggtagttcgccgggttctcttccaggcgccggctgattccgcgcagtgccgccagggtatcgcgcagttcgctgaccgccgggcccagctcggcgagtccctggatgccgccgtccagcgagtggcgattctcgctgatcaactggtcgagggtggtgctggtgcgctccagcgaagccatggtcttgttggcgttttccagcatccccttgccttgctcgttgagcaggccgttggcgctgcgcatcaactcgctggcctgggccagggcggcgttggcctgcctgctcgcctgggccaactgctgcatcaccgcgctgacgttctcgcgctcggcggagagcgcgccggtggcctggtcgagatggtcgagggtgcggctgatgcgcgctgtgttttcctcggagagcaggttgctgaagcgcgcgatgagctggttgatgttgcccatcaggtcttcgccgttgctcagtaactgggtcagcggcgagggcgtggcgacgatcaccgggatcttcccgtccttgccctccagcatcgggctggcgggcgtgccgctgctgagctggatgatcgaggtgccggtgatcccggtgagcgccagcttggcggtggtgtcctgcttgatcggcgcgctggccaccacgcggatgcgtgcccagaccttgcgcgggtccttcggatcgaggcggaggaaggccacgtcgccgaccttgatcccgctgtactgcaccgagctgccctgggaaaggccactgaccgcttcgttgaagacgatgtcgtagtagttgaacttgccctccgagccggacttggccagccacaggccgaagagcagggcggcgccgatcacgatcacgctgaacaggccgatcaacacatggtgggctcgggtttccatctcagtgattctccggcacggcggcggcttggtgggcggcgcgcccgcgcggcccgtggaagtattcgcggacccaggcgtcgtcggtggcggcgacccgttccagggtatcgactaccaggaccttcttctgcgacagcacggcgacccggtcgcagatggtgtacagggtgtccaggtcatgggtgaccaggaacacggtcaggccgagggcgtcgcgcagggtacggatcaggttgtcgaaggccgccgcgccgatcgggtcgaggccggcggtgggctcgtcgaggaacaggatgtccgggtccagcgccagggcgcgggccagggcggcgcgcttgatcatgccgccggaaagcgaggccggatacttgtcgccggcgttggccggtagcccggccagggccagcttgacctgggccaggtgctcggcgtcggcgcgcggcaggccggcgttctcgatcagcggcagggcgacgttctccaccacggtaagcgaggaaaacagcgcgccctgctggaacagcacgccgaagcgccgttcgaccagggagcggcgctcctctggcagttgcagcaggtcttcgccgaacacccgcacgctgccggaggtcggccgacgcaggccgacgatgctgcgcagcagcaccgacttgccggtgccggagccgccgaccacgccgaggatctcgccgcgacggacgtcgaggtcgaggtgctcgtggaccgcctgggcgccgaaacggttgcacaggtcgcggacctggatgatcgcctgcgggttgtcctggttcaccagcccatctccatgaagaacagcgcggcgagggcgtcgagcaggatcaccacgaagatcgagtggaccacgctggtggtggtgtgctcgcccaccgactgggcgctgccgctgaccttgaagccttccaggcagccgatcacggcgatcaggaaggcgaacagcggggccttgctgataccgaccaggaaatgctgtacgccgattccgtcctccatgatcgacaggaacatcgccggcgggatgtccagggtccaggcgcagacggtcatgccaccgacgatgccgcagagcatgccgacgaaggtcagcatcggcagcgataccagcagcgccagcacccgcggcagcaccagcagctcgatggggttgaggccgagggcgcggatcgcgtcgatctcctcgttggccttcatcgagccgatctgtgcggtgaaggcgctggcggtgcggccggccatgaggatcgcggtgagcagcacggcgaactcgcggaggaaggagaacaccaccaggttgaccgtgtagatggtcgcgccgaagttggccagcaccgtggcgccgaggaaggcgatcaccgcgccgaccaggaaggtcagcagggcgatgatcggcaccgcgtccaggccgctcttctcgatgttcgccaccagcggcgtgacccgccaactggccgggcggaccaggctgcggaacagggtctccagggtcaggccgatgaagccgaggagtgccttgaggtgcagccagaaggtctccatggcacaaccgatgcgagccagcagttcgatggcggtggttggcggcttgggtttctccggctcgcagaagtcgtgcagggcgtggccgacggtcttcagcagggcctggcgctcgcgcggcaggccgggctccagctcggcgaggtcggccaggcgctcggcgccgagcaattcggcgagcagggcggcgccggcggtatccagggcgcccaattggctcaggtcgaagctggcgttgcccgccacttcgctgcgcaggcgcgtcacctcgcgctccagagccgtgtagtgggcgagcgtccaatcacctatggctctgacgcgggcgggctgggtggagctatccaggctcacgtggccgggttgcggctgtgtcgtcatggtgcagaagcttacaccggcttttcagtccctgagtagagccattgcagacaggcccgtgagcgctcagtggcgccagaacgccggggtcagcaggaccagcacggtgatgatctccaggcgaccgagcagcatgccggcggccagcagccacttggcggcgtccggcaggctggcgaagttgcccgaggggccgatgatgggccccatccccgggcctacgccggccacggtactggcggcaccggtgagcgcggtcatccagtccaggccgatcagcgacaggccgagggcgagcaggcagacgacgatcgcgaagaagaacgagaaggtcaggatcgagcggacgatttcctcgtccaggcgatggccgttgtagttctgcttgagcactgcgcgcggatggatcaactggtagaggttggccttgagcagggtataggcgacctggaagcggaagatcttgataccgccggcggtagaaccggagcaaccgccgatgaagccgaggtagaagaacagcatgatcgagaagtgcccccacatgctgtagtcgccgagggcgaagccggtggtggtgaccaccgaggtgacgttcactgcgacaatgcggaaagcatccatccagggcagcttggaggttaccgcgtaccaggtgcccatcagcagccaggtcaccagcagcaggccgagcaggccgcggacctgctggtccttgatcagcgccttgcggtgtccgcgcagggtggcgacgtagagcgcgaacggcaggctgccgaggatcatcaccactaccgcggtccagtgcaccgctggctgcttccacttggccagggattggtcggaggtggagaaaccgccggtggaaatcgccgacatggcgtggttgaccgcgtcgaacgggctcatgcccgcgccccagaaggccaggctgccgagcagggtgatgccgacataggtggcgacgatgtacttggcgaccatgtgcgagcgtggcaggaccttttccgagcggtccgaggattcggtctggaacaggcgcatgccgccgatccgcagcatcggcaggatcgccacggccatggcgatgaagccgatgccgcccagccagtgcagcagagagcgccagatgaggatgcccggggacatgtcgtccagcccgctgagcacggtggagccggtggcggtgattcccgacatgctttcgaagaaggcatcggtgtagctgatgtgctgctgcaggacgaacggcagggcggcgaagatgcataccagcacccagctcgatacggtgagcatgtacatgtcccgcgggcgcaggtggacatgctcgggacgtcccggcaggaccaggccgaggccggtgacgaaggtggcgacgctggaccagatgaatgcctggatgccttcggtacggtcgaaggcgagcatggtcaggatcgggaccagcatgctggcggccagagtgatcaggaagatgccgatgatgaaaccgaggatacgtagggtcggcaaggccatggatcgtggggctctgggctgtggcggaccggccattctaccagccgtccgcggagagtaaatctgccgctgcacccctcttcacagctgccgcgaaatcgctagaatctcgcttcgcccgccggcgctcgccggtttctctggtgttctgccaaccatgtccactgacaatccgtgtcttacctgcggcgcctgctgtgcgcattttcgtgtgtctttctattggggcgagtgccgttccgcaggcggcgtcgtacccgacgaactgaccgtccgcatcagcccgcagatggttgccatgagcggtaccgagaacaagccggcacgctgcgtcgggctgctcggcgaggtcggttgcggcgttcgctgcaccgtctacgagcagcgctcgagtacctgccgcgagttcgaggcggcctgggctaacggccagcccaacccggcctgcgatgccgcgcgcgccgcctacggcctgccgccgctgaccccgccgctgcagccgcacctggcgccgggacgggtcgcctgagagcgggcgtgagcctggtgattgcgtctacaatggcgatttcgtttctgacaggagttcgcccatggaggctctcgacgccttgctcactcgcgtttcccacgcccgcctgagcgatcccgcgccctcgccggagcagctcgaccggctgttccgggtcgccttgcgtgccccggaccacgggcaactgcggccctggcgcttcatcctggtagagggcgaaggccgccgggccctgggcgacctctacgcccgcgccctggcgagccgccagccggacgccgccgaggaagcgctggccaaggcccgcaacatgccgctgcgcgcaccgctgctggtcgtggcggtcgcttgcctgcaggaccacccgaaggtgccgcacgctgagcaactgctggctgccggctgcgccgcccacggcctggtgctgggcgcctatgcccagggactgggggcgatgtggcggaccggcgagatggccaccgatccggtggtgcacgccggcctggggctcggcgagcaggagcggatcatcggcttcgtctacctgggtacgccgatgggcgagttgcgcacgccggcggaactcgacccgacggccttcgtcagcgcctggccgggctgagcggcaacagcaggcgtacgcaccaatacgcgccctgggcgtgccagagcagtcgtccgccctgccagccggccagtcgtcgggcggcttccacggccgccggcagccagcgccggccttcttccgcctggccgaggatgtccaggcgcagccggccgtggcgcgcgtccagcgctggattcagcgtgatgcgctgccacgggcgggcctgcgcggcgccgccgagcaggccgtagagcgcctcgtgcaaggccgggcgccagctctccagcggccaggtgccgcgctccggcaggctcaggtcgaggcgcgcccagcgttgccgcagttgctgggcgacctgtcccagctcgaccgccaggaccagcgattgcggctcgtcgccgggaagttccggcggcgcgatggcctggacgagcgggcgttcatcgaggaacaacgaagcgggaagagtcatgccggatgctcctgggggaagtgccgcgcatcggggcgtggcgtcattcggtcgccttgcgccgtagcggcaggctgagggtggcgatgaagccgccgtcgggatggttgcccaggcgcaggtgcccgccgtggcgctcgatggcgcggcgggcgatggccaggcccaggccgtgtcccgggctgctctggttgggtgcgcggaagaacggctcgcccaactgctcctgcagttcggcggcgatgcctggcccatggtcgcggacgctcaggcgcaggtaatcgccggcgctgctggcacgcacctccaggggttggccgacggggttgaagcgcacggcgttgcgcagcaggttgtccaccgcgcgttcgaacatgtccggccagccgtcgatgctcaggtcaggcgccacttccaggcggatatcctgctccggagccagcagcagggcgtcttcgcgcagccgctggagcagcggcagcagggcgatccgttggctcgcgccgggttcggcgtcgagccgggcgagggcgaggatctcgccgatcagcgcttccaggcggtcgcattcctgttccaggcgcggccacatctgcgcccgcgcttgcggttcggcgcgctcggccagggccagggcgatgcgcaggcgcgccaacggcgagcgcagttcgtgggacacgtcgcggagcaactgtcgctggctgccgatcaggctttgcaggcgttcgcccatgcggttgaaatcgcgcgccagggtgcccagttcatcgccgcgccgcgccaggcgggccaggctgtccttctggtaggcggtctggccgaggtcgtgcacggcgcgccgcagacggttcagcggacgggtgatggacagcgtcagcagcaggctgaacagggtcagcaccaccagtgcgatgcccagcgcgctgagcggccagagcaggctgccgcggtgccaggcctccagctccgggtgcgggatgcggtagatgaacagataggtatggttgctctgcgggctgacatattcctggctcagttggcgccaggggaagcgcggcaggttgcggtcgctggtgcgcggcgggcggtggcgggggcgcggcaggtaggtgccgtcgaccaggcgctggccgctttcgtcgagcacctggatggaaatcccgtagtcgcggcggcgttgctccagcaagccctgggccgcgaagctgccctgttcttcgtagagggcggtccactgctcggcgagatccttcaggccgggatggcgggcgatgatccaggtgtcctggttcagcgcgcgacccagcaggatggacagcccggctaccagcagcagggccagccagaaggcggcgaggattcgccagaagagtgaacgcatggttttcctgttgaatcgcatgtcgggccggccgcgtgggtaaacccctaggatatgcgattccggctggtcggaagaccgctaccggaggacccggtagcggtggctcggacgtcagttggacttcttgtcggccttccattgctggaattcggcccactctgccttgcgctgctcgcgcttcttctgcagttcgtcgaacttcttctgctgctcgggggtgagcagggcgcggatgtctttctgggtcttctcgtggctggccttgagttcgtccttcagggccttctgctcggccgccggcagcttggccaggtagcgctgggtgatctcgtggcgggccttcatctgttcgcccatcagtttgcccatctgctggcgctgttcgcgggtcaggttcagttccttcatcgggccgccatgccggggaccgtgctggcccatcatgtggccgccttccatcggcgggggcggcaggtcgttggcggcgggcgcggccatggcgaaggtcggcagggcggcggcgatgaacagggcggttagcgtcttgcgcatggtgtttctcctttctgggtccggccatttaccggatgagcccagtctagggaggtcaaggtcaagcgcggtcagccctgggtaaagcttgggtaaagaccttgtgtcggcgggctgacgaaacccgctcagtggctgtagtagtagccgcggccgcgcagggcgaggatgcgcgggctgccgtcggggtggctgccgagcttcttgcgcaggttgctgacgtgcatgtccaggctgcggtcgtagagggtcagcttgcggcccagcgccagttgcgccagggcctgcttgtccagcggctcgccgggctggcgcaggagcgcttcgaggatgcggctttcggaaagggtcaggctgatctcctggccgtcgatctgcgccacgccgcgcgtcaggttcagcgacaggtcgcccagttgcatctgcgcgctgggctgcgccgggtgggttcgccgcagcacggcgcgcagccgtgcggtgagttcgcgcgggtcgcagggcttggccaggtagtcgtcggcgcccagttccagaccgaggatgcggtccagcggctcgccgcgggcggacagcatcagcaccggcaggtcgggatggtcgccgcgtagttgcttgagcagttccaggccgctgccgtccggcagcatcacgtcgagcaccacggcatccggcgtctgctcggcgagggcgcgacgggcctgggcgccgtcgtggctggcacgcacggagaaaccttcctggaccagccaggtaccgagcagctcgcagagctcccggtcatcgtcgatcaacagcagttcgctcatcgggtgtcgctcaattgatccattcgcgtcgctgtcgccggcggccgcggctcagggcgccgaggacgaacgcgagcagggcggtggcggcgccggcgacataccaggtctgctcttctgtgagcagcggcggttgccgctgcgcctgggccgcctgcaactgctcgcgcaactggcggttctcctggcgcatacgactgaccagttcgtcgcgctggcgttccgtttccaccaggcggcgctccagttcggcggtagcctgcgcaatggaaggctgcgcggctggaatcggtgctggcgcgggttcctcggcctgggccagggaagctcccaggctcaggctcagcagcaggcaatgggcagtggatggacgcatcatgactccttgtaccgatgaagcgacggattgcactgtcttccggttcgcccttccggcttggcgaaagcgccgggccggcctggttgcgctgcggcgggcaccggaaagcggcgtccggtgcgaaaacgtttgccgggaagacggacggaccgcccgcccggtgcccggcgactgcctcagggcaggactttcttgaacggcttgaccaccacctcggcatacaccccggcggcccggtaggggtcggcctcggcccagctctgcgccgcggccagggaatcgaattcggcgacgatcaggctgccggtgaagccggcggcgcccgggtcgttgctgtcgatcgccgggtgcgggccggcgagtaccaggcggccttcttccttcagctgttcgagacgggccaggtgggccgggcggctggccaggcggcgttcctgggaagcggggatgtcacgggcgatgatcgcgtagagcatgtcagtccttgggcttttcgccggtatcggcgtcgtgcaggtggcgagccaggaacaggccctggccgatcaggaacagcaaggtcatgccgaggctgccgaacaccttgaagtccacccagaagttcggataggtgaagaccacgtacaggttggcgaagccgcacaccaggaagaacaccacccaggcgatgttcaggcgcacccagaggccctgcggcaactggatggcatggcccatgatgcgctggatcatcggcttgtcgccgatgaagtgactgccggcgaaggccagggcgaacagccagttgaccagcggcgccttccatttgaggaaggtgtcctcgtggaaggccagggtcaggccgccgaggaccaggcaggcgccgagggtgaaccactggctcttttccaggtggcggtgcttgagccagagggcgccgtagacgatcaccgaggcgaggatcagggtcgcggtcgcgccgtagatgccactcagattgaacccggcgaactcgacgttctgagggtctatcttgtagacgatgaagaacaggatcagtgggatgaaatcgatgaattgcttcatggtggcagtcaggacacggttgaagcggcataatagcaacctctggatgttctgaaacagtcatcctgtctttccgaatgcgtcaggcctgtgccgcaggcgcattcgccaggtggagcaggctccccggacccatgaacggtacgtctcgataccgcgaggcagcgaatcggcgttgcttcatcaccattcttcactggaatcaggattcagccatgcgtgtcgatctgcattgccacagtaccgcctccgatggcgttctcgcgcccgccgccctggtgcagcgggcccacgagaaaggcgtcgggctgctggcgctgaccgaccacgacaccctggaaggcttgccggaagcccaccaggcggccgctcgactcggtatcgaactggtcaacggcgtcgagctgtcctgcacctggggtggcgccactatccatgtgctgggctacggtttcgacctcgacgccgctcccctgcgccaggccaccgaagccctgcaccgcggccgctgggcgcgcgccgaggaaatcgaccgacggctggcggccaagggtatgcccggggcgctggagggcgcgcgggcgatccagcgggccctgggcgacagcggcaacgcgccggcgcggccgcatttcgccgagttcctggtccagggcggctgggtcaaggatcgcgccgacgcgttccgcaagtggctgggggccggcaagctgggagacgtcaagcagcactggccgaccctggaggaagtggtcggctgcctgcgcgaggcgcgcgcctggatcagcctggcgcacccgtaccattatgatttcacccggaccaagcgccggcgcctggtcgccgactttctccaggccggcggacacgccatcgaggtggtcaatggcgtgcagccggccgaacaggtcggtaccctgtcgatcctggcccgcgagttcggcctgatggtcaccgccggcagcgatttccacgcgccgggcgactggtccgaactgggcatgtaccgtgcggttccagaggaccttccggccatgtggccgcgtttcgccaggcattttcgcgataccgaacgtcattccgaagccaagggggccgaatgagccagttcttccagatccatccggaaaatccccagccacggctggtcaagcaggcggtggaaatcgtccgccagggtggggtgatcgtctatcccaccgactcgtcctatgccctgggctgccgcatcggcgaaaagcccgcggtggatcgcatccgccgcatccgccaactggacgacaagcacaacttcaccctggtctgccgcgacctttccgagctgggggtctatgccaaggtcgacaccggcctgttccgcctgctcaaggcgcacacccccggtccctacaccttcatcctcagcgccacccgcgaggtgccgcgcatgctcctgcaccccaagcgccgcaccatcggcctgcgcgtgccgaactgtccgatcgcccgggcgctgctggaggaactgggcgaaccgctgatgagcgtgagcctgatcatgcccggcagcggcgagccgctgaacgatccctatgaaatgcgccaggtgctggaacaccaggtcgacctgatcgtggacgggggctatggcggcggcgaggcctccaccgtgatcagcctgaccgacaccgatcccgaagtgatccgcgtgggttgcggcgatccggtgccgttcatgcagccggcctgagcgccgcccgaatccgcccaccacgagcctagcgatgcaggacgataacccggccaacgccgacacccctccagccgaacccgccgccgagcgggtgccgctgcaactggcgctggtctacggcgaggcggtcaccgagctgccgcaggacctctatatcccgccggacgcgctggaggtcttcctcgaggccttcgagggcccgctcgacctgctgctgtacctgatccgcaagcagaacatcgacatcctggatatcccggtggcggaaatcacccgccagtacatgggctatgtcgagctgatgaaggcggtgcgcctggagctggccgccgagtacctggtgatggcggcgatgctggcggagatcaagtcgcgcatgttgctgccgcgctcggcggaagccgaggaggaagaggaagatccacgggccgagctgatccgccgcctgcaggagtacgaacggttcaagaaggccgccgaagacctcgacgaactgccccgggtcggccgcgacgtgctggtgccggcggtggctgctcccgaggcgcgggcgcgcaagctgctgccggagctggcgctgcaggagctgatgctggtgatgggcgagatgctgcgccgcgccgacctgttcgagagccaccaggtgacccgcgaggtactgtccacccgcgaacgcatgagcgaagtgctggagcgcctgaaaggcggcgccttcgtgcccttcatccagttgttcaccctggaggagggcaagctcggcgtggtggtcaccttcatggcgatcctcgaactggtcaaggagcagatggtggaactggtgcagaacgaggctttcggcgccatccatgtgcgcctgcggatagcccgcgaagcggaggaaggcgaaaccctggaggaagccctggaagacgatttcgagtgagcgcgccgctggccgttcgtcctcctgcggacggtcgccttttccgagcttccggcttcgctccctgccgtggcctgttaagctgcatgcccgattccgctatctttccctcttcctggctccggtatccgttgcgacgatgaacctgtccgatccccacgaactcgccaccctgctcgaagggatcctcctcgcggccggcaagccgctgtcgctggaacgcctggccgagctgttcgacgaggcagagcggccggagccggggcagttccgcgacgccctggcgatcctggcactgtcctgcgcggggcgctccttcgagctgaaggaagtcgcgtccgggtatcgcctgcagattcgcgagcgtttctcgccgtgggtcggccgcctctgggaggagcgtccgcagcgctattcgcgcgcgctgctggaaaccctggtgctgatcgcctaccgccagccgatcacccgtggcgagatcgaggagatccgcggcgtggcggtgaacacccagatcgtcaagacgctgatggagcgggagtggatccgcatcgttggctaccgcgaggtgccggggcgcccggcgatgctggcgactaccaaggcgttcctcgattatttcaacctgaagagcctcgacgagctgccgccgctgtcggcgctgcgcgagatggagcccgagccggaaccgccggtcgaagtggcgcccgcggcgcagccgccgcgcgacgatctcgacgaggatgcgattcctgcctcgatccaggccctggccgatcgcgccatcgccgaggccggggaaagcctcgaggagatcgagggggaggccggcgagccggagaagccgcgcgaggaaaccagcttccgcagcctgctgctggaactggacgagatggagcagggcctgaagaccgacttcgacgacctgctcgaccctccggagccctcggagcagggcgacgagtccgccgagccagcggctgggccgattcccgtggtcgcggagcaagccgtcgagcctgccgtcgcggaggctgtcgcgggcgccgatcccgatgacgaagagcgcgccctggcggaggccatgcgcgaggagcgcgaggcactggacgccgacgactggccgcgccgctgaccgtcgttccaccctgtagaattcatccggccgcgccggcgaggccggcccgctccgtttcatcgaccctggaacccgcccatgaaagagaccctgaacgaactgatcaccctcatcagcaccggctgcatgggcgccgaggagatccggcggatcgccgacgaggcggcccaggcctatgccgatccggcagggttcctcgccgccaacccggatatcaactacgacgacagcttcccgatcccgctcggcgagtgggtggtggtcggtagcctgccggatatcgtgctgttccaggccgacacctatgccgagctgttcgcccggatcgtcgcctccttcggcaaggacgtggcgttcaacatcaagccgaagcagttgctcaagaccgagccgctggtcgccctcaaccgtatccaggtgcaactgagcagcatgtatccggaaaagggcggctacgtgctggtggatttcagcgagccgctggacgacgagttgcaggcggtgctggtctatacccaggacctgccgcgggtcatggcgctctgcgtcgaggccggcatctatgccgcgcctgcctacgaaagcctgcgcgacgccgaggccgagtgaccgcgggccgctcgatcggcccgatagtcattccctcctggacgccggcccgccgcctgtcgtgaagtgacgggcgaggaccggttgcggtccgcgccgaaaaagggggaacgcttgaaaagtccttgcatcaatatctgtgagttcgatgccgacgtgtgccgtggctgcgggcgtacgcgccaggaaatccgtgcctggaagcgcgcggacaaggccgagcagcgactgatcctcgccgaggccgacctgcgcctgctggcgttgcaggcgcgcggtcggcgcaagttccgctgaggcgcgtcagtcgcgggcggcggccagcgccagggcgctgtccagcatgcggttggagaagccccactcgttgtcgtaccaggccatcgccttgaccagccggccgctgaccttggtgtggttggcgtcgaagatcgacgagcgcgggtcgtgattgaaatccaccgacaccagcggctgggtgttgtagccgagcaccggagagccctcgctggcttcgcgcagcaggcggttgacctcgtctacgctggtatcccgggccacctgcacggtgagatcgaccagcgacacgttgatcaccggcacccgcaccgccagcccggtaagcttgccggcgagttccggcaggaccaggccgaccgcctcggcggcgccggtcttggtggggatcatcgactgggtcgccgaacgtgcgcggtacaggtccgggtggtacacgtcggagaggttctggtcgttggtgtaggcatggatggtggtcatcaggccgtgctcgatgcccagctcgcgatgcagcacctgggccaccggtgccaggcagttggtggtgcaggaggcgttcgagacgatccgatgggaggcgcgcagcacctcgtggttgacgccgtagaccacggtggcgtcgacgtccttgccgggcgccgagatcagcaccttgccggcgccggcctgcaggtgggcagcggctttgtcgcggctggtgaagagccccgtgcactcgagcacgatgtccacgccgaggctcttccagggcagttccgccgggttgcggatggcgctgacggcgatgcggtcgcccatcacccgcaggctttcggcatcgtgctcgacctcgccgggaaagcgtccatggacgctgtcgtactggaacaggtgggcgttgaccgcggcgtcgccgaggtcattgatcgccactacctgcaactgttcgcggtagtggccggtatacagggcgcgaagaacgtttcggccgatgcgaccgaagccgttgatggccaggcggatagtcataatgaggtcgtctcttttctattgttgtggtaaaaaccattacatttcgtccagaaagaaaagtaaacatccttcaaccgatgattatgttgtaaaaacaacaattgatagtctgtaggagaatctgccatgcaccctcgtgtgctcgaagtcacccgccgcatccaggcccgtagcgcggccactcgccagcgctacctcgagatggtccgggctgcggccagcaaggggccgcaccgaggcaccctgccgtgcggcaacctcgcccacggggtcgcggcctgtggcgaaagcgacaagcagaccctgcggctgatgaaccaggccaacgtggccatcgtttccgcctacaacgacatgctctcggcgcaccagccgttcgagcgctttccggggctgatcaagcaggcgctgcacgagatcggttcggtcggccagttcgccggcggcgtgccggccatgtgcgacggggtgacccagggcgagccgggcatggaactgtcgctggccagccgcgacgtgatcgccatgtccaccgccatcgcgctgtctcacaacatgttcgatgcagcgctgtgcctgggtgtttgcgacaagatcgtgccgggcctgctgatcggctcgctgcgcttcggccacctgcccaccgtgttcgtcccggccgggccgatgccgaccggcatctccaacaaggaaaaggccgcggtgcgccaactgttcgccgagggcaaggccactcgcgaagagctgctggcctcggaaatggcctcctaccatgcacccggcacctgcaccttctatggcaccgccaataccaaccagttgctggtggaggtgatgggcctgcacttgcccggtgcctccttcgtcaacccgaacacccccctgcgcgacgaactcacccgcgaagcggcacgccaggccagccggctgacccccgagaacggcaactacgtgccgatggcggagatcgtcgacgagaaggccatcgtcaactcggtggtggcgctgctcgccaccggcggctcgaccaaccacaccctgcacctgctggcgatcgcccaggcggcgggcatccagttgacctggcaggacatgtccgagctgtcccatgtggtgccgaccctggcgcgcatctatccgaacggccaggccgacatcaaccacttccaggcggccggcggcatgtccttcctgatccgccaactgctcgacggcgggctgcttcacgaggacgtacagaccgtcgccggccccggcctgcgccgctacacccgcgagccgttcctcgaggatggccggctggtctggcgcgaagggccggaacggagtctcgacgaagccatcctgcgtccgctggacaagccgttctccgccgaaggcggcttgcgcctgatggagggcaacctcggtcgcggcgtgatgaaggtctcggcggtggcgccggaacaccaggtggtcgaggcgccggtacggatcttccacgaccaggccagcctggccgcggccttcaaggccggcgagctggagcgcgacctggtcgccgtggtacgtttccagggcccgcgggcgaacggcatgccggagctgcacaagctcacgccgttcctcggggtcctgcaggatcgtggcttcaaggtggcgctggtcaccgacgggcgcatgtccggggcgtcgggcaaggtgcccgcggccatccatgtgagtccggaagccatcgccggcggtccgctggcgcgcctgcgcgacggcgaccgggtgcgggtggatggggtgaacggcgagttgcgggtgctggtcgacgacgccgaatggcaggcgcgcagcctggagccggcgccgcaggacggcaatctcggttgcggccgcgagctgttcgccttcatgcgcaacgccatgagcagcgcggaagagggcgcctgcagctttaccgagagcctcaacggctggcgctgattctgataggtcgatatccgccggcgcttggctggcggctgtctctccggcaacatctgccgaccgtcccgccctggcgcggggcattgcggttcaacgacgatgaataacgacaacaagagaagcgccggcggcctcggcctggtcggcgatatcggcggcaccaatgcgcgtttcgcgctctggcgcgggcagcgcctggaatccatcgaggtgctcgcctgcgccgactacccgcggcctgaactggccgtgcgcgactacctggcgcggatcggcgaatcggtggcgaacatcgactcggtctgcctggcctgcgccggtccggtcggggcggccgatttccgtttcaccaacaaccactgggtgatcaatcgtgccgcgttccgcgaggagctggggctggatcacctgctgctggtcaacgacttcagcaccatggcctgggccgcctcgcggctaggtgcggacgagctggtgcaggtccgcgccggcagcgcccaggcggatcgcgcccggctgatcatcggtcccggcaccggccttggcgtcggcagcctgctgccgctgggcgggggacgttgggaagtgctgccctgcgagggcgggcacgtcgacctgccggtcacttcgccgcgcgacttcgcgctctggcagggcctgcaggcgcgctacggacatgtctccgccgagcgcgcactgtccggcaacggcctgctcgccctctatgaaatcagctgtgccctggacggggtcgccgtacgcgcgagcagtgcggcggaagtcggtgccctggccatggccggcgacgcccaggcggacgccgtgctggagcacttcttcctgtggctggcgcgggtcgccggcaacgcggtgctcaccgtcggcgcgctcggtggcgtctacattaccggcggcatcgtcccgcgtttcctcgagcgtttcatcgccagcggcttcgccgaggccttcgccagccgtggcaagactagcggcgcttacctgcaggacgtaccggtgtgggtcatgaccgccgaacatccgggcctgctcggcgccggggtcgccctgcagcaggccctggacgccgagggctgagtcggcgtcgagcaaccgcataaggaggagtctcgtgagcgcgaacggacgatcgatcctgctggtggacgatgaccaggaaatccgcgaattgctggagacctacctgagccgcgccggcttccaggtccgcagcgtctcgcggggcgccgacttccgccaggcgctgtgcgaggaggaggcgagcctggcgatcctcgacgtgatgctgccggacgaggacggcttcagcctctgtcgctggattcgctcccaccagcgcctggcctgcatgccgatcatcatgctcaccgccagttccgacgaggccgaccgggtgatcggcctggaactgggcgccgacgactacctgggcaagccgttcagcccgcgcgagctgctggcgcggatcaaggccctgctgcgccgcgcgcagttcacccaggtgcgcggtggcgacgtactggccttcgaggactggcgactggacacggtcagccaccggctgttccacgaggacggcgaggagttcttcctcagcggcgcggatttcgccctgctcaagctgttcctcgaccatccgcagcagatcctcgaccgcgacaccatcgccaacgccacccgcggccgcgaggtgctgccgctggagcgcatcgtcgacatggcggtcagccgcctgcgccagcgcctgcgcgacaccggcaaggcgccgcggctgatccagaccgtgcgcggcagtggctacctgctggcggcgcaggtgcggccgcacctgcagccatgagcgaacggcggcgctggtcgccggtgccgcgctcgctgctcgggcgcatgctgctcctgaccctgctcgcggtgctggtcgcgcaagggctttccagcctgttctggctgtcgcacctgcgctccagccagcgcgagggcctgctcaccagctcgcgcagcctggcctactcgatggcggccagcgtcagctacttccgttccctgccgctcggctaccgtccgctggtgctcgaccagttgcgcagcatgggcggtacgcgcttcttcgtctcgctgaacgaccggccgctggagatgcgtgccctgccggacacgccgaacaagcaggcggtgctggagatcgtccaggacgtgttgcaccaacgcctgggcaaggaggtcgagctgcaggtcgaattcgtcagtcccgacgagctgcgcctgtttaacggcgcgctgaagctcgacgagctgccgcgttcctgggcgcactacgcgctgaccctggagccggtgaacccgccggtgctggtgacccagatccgcatcggcgacagcgagtggctgtacatcgccagcctgatgccggcgccgtacgtcagcctggaacccgagggactgcaaccgcagcaggtgctctcgatcgttttcaccagcctgttgctgctgcttttcaccggtttgctgatgcattggcagagccgtccgctcaagcgcctggcgcgcgccgcccgcgacctggccctgggcagtccgtcggcagcgctggaggagcgcggcgccagcgaactggtggaggtggcgcgcgccttcaacaccatgcatgagcgcatcgaccgctacctgaacgagcgcgggcagttgttcagcgccatctcccacgacctgcgcacgccgatcacccgcctgcgcctgcgggtagaactcctcgaggacgagcgcttgcaggagaagttcgggcgcgacctggacgagctggaactgctggtgaagggcgcgctgcagtgcgtgaaggacaccgatatccacgagaacgtcgagccggtcgacctcaacctgttgctccagcacatcgccgagccctacctggccgatggccgggtggaggtcgtcggtcgcgccgcggagccttatccgggcaagcccctggcgctcaagcgctgtatcggcaacctgctggacaatgcgctgaaatacggcgaacgcgcccgcctgagcctggaggacgggccggaagcggtggcgctgcacgtcgacgacgacggccccggcgtgcccgagcagcgcctggaacagatcttcgagccgcgcttccgtctgtctccgcgagggcagggctacgggctgggcctgggcattgcgcgcaacatcgcgcacacccatggcggcgaagtcagtttgcagaaccgtcgcgagggcggcctgcgggtcagcctgcgcttgccgcgcctggggctggagtgatgggctggcctgccgggcccttgaacgaggcgggcaggcacgaggttctcccgtgttctgcggcagccgcagacagaggcggagcgggcgctatggcagtgtttgcgcgggcatcgattgctcgggctgaagtttcgtcggcagaaggttctcgggccgtacatcgtcgatttcgtctgccatgagcggatgctggtgatcgaactggatggcgggcagcatgtgggttcgccggccgatgcctggctggagagccggggtccagggtactgcggttctggaacgacaaggtgctggcgcgcagggaggtgctgctggaggtcattctcgtgttgtaggaggtttctgtcgcgaaaccgccttgccgagttcgagtccagattttcctgctctgcctcaatcccaatgtaaccactccgtgacaaacccggatcgcttcgttacccgcgacgcggaacgcttgaatagactcgaagcattgcaagcgcagacttgctccgaataacaagaagaaggttttcctcatgaatgcgatccgtcgcctctctgccgtcatctgtctttcctccctctgcctctccccactgctggcccaggccggcgaagtcgaagtgctgcactggtggacctccgccggcgagaagcgcgccgccgaaaccctgaagaagctggtcgaagccaagggccacacctggaaggacttcgccgtggccggcggtggcggcgaggctgcgatgaccgtgctgaagacccgcgcggtgtccggcaatccgccggccgcggcgcagatcaaggggccggatatccaggagtggggcgaactgggcctgctcgccgacctcaacgcggtggccgccgaaggcaagtgggacagcctgctgccgaagcaggtggcgcagatcatgaagtacgacggcgactacgtagcagtgccgatcaacgtacaccgggtgaactggctctacatcaacccggaagtgttcaagaaggccggcgccaccccgccgaccaccctcgacgaactgttcgtcgccgccgacaagctcaaggccgccggtttcacgccgctggcccatggcagccaaccgtggcaggacggcaccgtgttcgagaacctggtgctgagcaagatgggtccggaaggctatcgcaaggccttcgtcgaacaggacaaggcgaccctcaccggagcgcagatggtcgaggtgttcgccgcgctgaagaagctccgcggctatgtcgatgccgacgccgccggtcgcgaatggagcgccgccacggcgatggtgatcaacggcaaggccgggatgcagatcatgggcgactgggcgaagagcgagttcaccgccgccggcaaggtgccgggcaaggactaccagtgcctgccgttccccggcacgcagaaagccttcgactacaacatcgactcgctggtgatgttcaagctgagcaacgcggagaaccgcaaggcccaggaagacctggcgcgcagcgtgctcgacccgtccttccagaaggacttcaacctcaacaagggctccatcccggttcgcctggacgccgacatggcgccgttcgacagttgcgcccagcagtcgatgaaggacttcaagcaggcttcccaggacggcaacctggtgccgagcatggcccacagcatggccgcttccagctacgtgcagggggcgatcttcgacgtggtgaccaacttcttcaacgaccccgccgcggatccgcagaaggccgcccagcaactggcggccgccatcgaggcggcggcgcagtaagtccctggcgcggagcccggcctgggctccgctcgatcctcccgactggctccgtgccgccgagcggcacgggtgggttccttcgcacgcgagaaaacgcatggcgaccaattcccctgtctatcccacggctccggtagcgcctcgtcgcgtctcgccactcgatcgcctgcaaggctggctgccgaagctggtgctggcgccaagcgtggtcgtggtgctgttctgcatgtatggctacatcggctggacgctgctgctgtccttcaccaactcgcgcttcatgcccagctacaagtgggccgggctgagccagtaccagcgcctgtgggacaacgaccgctggtgggtggcgagcaagaacctgctgctcttcggcggctcgttcatcgccatctgcctggtgctcggagtgttcctcgcagtgctgctggaccagcgcatccgccgcgaaggcttcatccgcaccctctacctgtatcccatggcgttgtcgatgatcgtcaccggcaccgcctggaagtggctgctcaatccgggcctgggcctggacaagctgctccgcgactggggctgggaaggtttccgcttcgactggctggtggacccggagcgggtcgtctactgcctggtgatcgccgccgtgtggcaggcctccggcttcgtcatggcgctgttcctcgccggcctgcgcggggtcgacccggccatcgtgcgcgccgcccaggtcgacggtgcgagcctgccgaccatctacctgcgcatcgtcctgccgagcctgcgcccggtgttcttcagcgcgctgatgatcctcgcccatatcgcgatcaagagcttcgacctggtggcggcgatgaccgccggcggcccgggttattcctccgacctgccggcgatgttcatgtatgcgcataccttcacccgtggccagatggggctcggcgcggcgagcgcgatgctgatgctcggcgctgtactggcgatcgtggtgccttacctgtattccgaactgcgaggcaagcgccatgcgtgacgcgtccctgaacccgagcttcagcgtcagccgcctggccgtgcacctgaccctctggggcgcctgcgcgctttacctggtgccgctgctggtgatgctgctgaccagcttcaagacgccggacgacatccgcaccggcaacctgctgtcgctgcccgacaccttcaccgtcatcggctggctcaaggcctgggacagcgtcggcgcgttcttctggaactcggtgctgatcaccgtgcccggcgtgctgatctccaccttcatcggcgcgttgaacggctacgtgctgtcgatgtggcgcttccgcggttcccagttgttcttcggcgcgctgttgttcggctgcttcctgccgttccaggtgatcctcctgccgatgtccttcaccctcggcaagctcggcctggccaataccaccagtggcctggtgctggtccacgtgatctacggcctggccttcaccacgctgttcttccgcaactatttcgtggcgatcccggatgccctggtcaaggccgcgcgcctggacggcgccggcttcttcaccatcttcctgcgcatcctgctaccgatgtccacgcccatcgtgatggtctgcctgatctggcagttcacccagatctggaacgacttcctgttcggcgtggtgttcgccagcggcgattcgcaaccgatcaccgtggccctgaacaacctggtgaacatcaccaccggggtcaaggaatacaacgtcgacatggccgcggcgatgatcgccgcgctgcccacgctggtggtctacgtactggccggcaagtacttcgtgcgcggcctcaccgccggcgccgtgaaaggctgagacgggtcgctgaccccggagacgaacgaaacatggcaaccctcgaactgcgcaacctgcacaagagctacggcagcggcctggcggataccctcagggacatccggctgaagatcgactccggcgaattcctgatcctcgtcgggccctcgggttgcggcaagtcgaccctgatgaactgcatcgccgggctggagagcatcaccggcggtgcgatcctggtggacggccaggacatcagcggcatgagccccaaggaccgcgacatcgccatggtcttccagtcctacgccctgtacccgaccatgagcgtgcgcgagaacatcgccttcggcctgaagatccgcaagatgccccaggccgccatcgacgaggaggtggcgcgggtggcccggctgttgcagatcgagcacctgctcgaacgcaagccctcgcagctctccggcggccagcagcagcgggtggccatgggccgggcgctggcgcggcggcccaaggtctacctgttcgacgagccgctgtccaacctcgatgccaagctgcgggtggaaatgcgcaccgagctgaagctgatgcaccagcggctgaagaccacgaccgtgtatgtcacccacgaccagatcgaggccatgaccctcggcgacaaggtggcggtgatgaaggacggcgtcatccagcagttcggcacgccgcagcagatctacaacgccccggccaacctgttcgtcgccagcttcatcggttcgccgccgatgaatttcattccgttgcgcctgcagcgccgggacggacgctggaccggcctgctcgatagcggccaggaccgtatcgaactgccgctgagcctggagcccggcctggaggaggggcgcgagctgatcctcggcgtacgaccggagcagatcgccctgggcgatggcagcgctgcccatgacctgcgtaccgaggtcgaggtgctcgaaccgaccgggccggacaccctggtcttcgtcaccgtcaaccaggtcaaggtctgttgccgcctggcgccggacgtcgcgccggccgcgggcagcggcatgagcctgcgcttcgatcccgcgcgggtcctgctgttcgacgcgcagagcggcgagcgcgtggccgtgcgcacggcgggcgtggtggcggagaaggtcaccgccttgaacggcaatcgccagaagaactcctgaatcctttcgtactgcctagaccacaaccacgaggacgctggaaatgtacaagaacaagaaaaccagaccggccgccaggaccgttggctgcctgtttgcccttggagcgctgggcttggggagcgcggcgcacgccgccgaggcgttctccccgaactcgaaatggatgctcggcgactggggcggcaagcgcaccgagctgctggagaagggctacgacttcaagctggagtacgtcggcgaggcggcggccaacctcgacggcggctatgacgacgacaagacaggacgctacaccgaccagttcgccctgggcgtgcacatggacctggagaagatcctcggctggaaggctaccgagttccagttcaccgtcaccgagcgcaacggcaagaacctttccaacgaccgcatcggcgacccgcgtgccgggcacatcagctcggtgcaggaggtctggggccgcgggcagacctggcggctgacccagctgtggctcaagcagcagtacttcgacggcgcgctggacgtgaaattcggccgtttcggcgagggcgaggacttcaacagcttcccctgcgatttccagaacctggccttctgcggctcgcaggtgggcaactgggcggggagcatctggtacaactggccggtcagccagtgggcgttgcgggtgaagtacaacttcgcgccggactggtacgtgcaggtcggcgcctacgagcagaacccgtcgaacctggagaccggcaacggcttcaagatgagcggcagcgggaccaagggcgcgttgctgccggtggagctgatctggcagccgaaggtcggcgccgagcaactgccgggcgagtaccggctgggctactactacagcacggcgaaggccgatgacgtctacgacgacgtcgacggccagccgcaggggctgaccggcaacgacttcaagtcgcgcggcagcaagcatggctggtgggtggtggcgcagcagcaggtcacttcgcacaacggcgatgcctcgcgcgggttgagcctgttcgccaacctgacggtccacgacaaggcgaccaacgtggtggacaactaccagcagctcggggtggtctacaaggggccgttcgacgcgcggccgaaggacgacatcggcctgggcatcgcgcgcatccatgtcaacgacgatgtgaagaagcgccagcgcctggtgaaccaggtgaacggcatcgacgactacgacaacccgctgtaccagccgctgcaggacaccgagtacaacgccgagctgtactacggggtgcatgtgaccgactggctgacggtgcggccgaacctgcaatacatcaagcagccgggcggggtcgacgaggtcgacaacgcgctggtggcggggatcaagatccagacggtgttctgatcgtcgcgttgcctgctccggtgttgtgcctggacccgcccgagcgtttcgggcgggccgtttttttccggcgaccgctcttcccggctgcctgttacaaaccgactacgcttttcctgtgccgatcatttggggcttgcgtgcgaaatgtagtaaaactacacggatgcacgcccgggctttccgggaaggggagagggtaggacaatcggacatgcttgagcatccgctgcagcgtttctttcattccatgcgggccaagcgaccgttcgactgggtacgcttccaacgtcgcgatctgctgttgatcgaccatccgctgtgccaggccgtattcagtcggcaaggggcgcagctcctgcatttccagccgcagggcgaacgcccgttgctgtggtgcgccagcgaatggccggccctcagcagcgcgccggtgcgcggcggcatcccggtctgctggccgtggttcggcagccatccgaacggcagcgaatggccgcagcagggctgggcgcggcaacgcgaatggcgcctgctggatgcctacgccgacgaaagcaaggtggtggtgagctggcaactggacctggaggactggcacgtgcgcctcgatgcgcgccttggccagcgcctggagctggagctgtgcagctaccatgaggaagacgacgattgcctgttcagcttcgccctgcagccctactggcgggtcggcgcgctgagccgggtggtggtgcacggcatggagctggagtcggctcgcggccagcgcggcgcttcgcggattccgggaacctggataccgcgcggcgcggtcaagcaggtgctctaccatcccggatcgctggtgctggaggacggcggctggaaccgccgcttgcggatcgacaagaacgtcagcgccggcagcgtgatctggcaccccggcagccgcccggtggagcaggtcgagccgggcgaagcggaacgcttcctctgtatcggcgccgctggctaccgcccgggcgggctgatcctggcgcccggcgaacgcatgcgcctgagtctcgccgccggcctgcaataggtgggcggtcagttgtcctcgtcgaggggatagcgggtcggcaccaggctttccttgatccgccgcaggtgcggctggaagtccacgccgcggcgcagggtcactccggtggccagtacgtcgagcacggtgagctggacgatccgcgaagtcatcggcatgtagatgtcggtgtcttccggcaacgggatgtccaggcacagggtgctggccctggccagcggcgagccggcggcggtcaggccgagcaccgaggcgccgttctcccgcgccaggtgcgccacctccaccagctcgcgggtgcgtccggtataggaaatcaccacgaacaggtcgccggtatgcgccaccgaggcgatcatccgttgcatcagcacgtcggcctgggcgctcaccgccaggttgaagcggaagaacttgtgctgcgcgtcgagcgctaccgaggccgaggcgccaagaccgaagaagtggatctgccgggcctggatcaacaggtccacggcgcggtcgatgacgcgtgggtcgagcagcttgtgggcgctgtcgagggaggcgatggtgttgctgaagatcttccgcgtataggcttccggcccgtcgtcctcggctaccgcctgggtcacgaaggcagcgccgctggccaggctctgggccagctggatcttcagttccggatagccgctcatgccgaaggagcgacagaagcggttcaccgtcggttcgctgaccgctgccgcctgggccagggcggcgatgctgaaacgggtggcctgctgcgggttctgcaggatgacctcggcgactttgcgctccgccttgttcagttcgtccaggcggctctggatctgctccagcaggtttttcatccgggttcctcgtgttctgtcggcccggcggggaagggccggcggcggcgcctatcctaacgtcaggccggcatgcgaccaacagcgtggcgggctgggaaaaatatgttgtttaattactacatatttgtcttaattgcgcagtggatggctcaatatcactcaatatttggttggtaacaacaaatgcctgatgtccgcgttctgccttgcacgttagcgctgttcggtgcgctgggcgatctcgccttgcgcaagctgttcccggcgctctaccaactcgatcgtgagaacctgctgcaccgcgatacccgcgtcctggccctggcccgtgacgaaggcgctgccgccgaacacctggcgacgctggagcagcgcctgcgcctggcagtgccggcgaaggagtgggacgacgtggtctggcagcgtttccgcgaacgcctcgactacctgagcatggacttcctcgacccgcaggcctatgtcggcttgcgcgaggcggtggatgacgaactgccgctggtcgcctacttcgccacgccggcctcggtgttcggcggcatctgcgagaacctcgccgccgccggtctcgccgagcgcacccgggtggtgctggagaagcctatcggtcatgacctggagtcgtcccgcgaggtcaacgaggcagtcgcccggttcttcccggaaagccgcatctaccggatcgaccattacctgggcaaggagacagtgcagaacctgatcgccctgcgcttcgccaacagcctcttcgagacccagtggaaccagaaccacatctcccacgtggagatcaccgtggccgagaaggtcggcatcgaaggccgctggggctacttcgaccaggccgggcaactgcgcgacatggtgcagaaccacctgctgcaactgctttgcctgatcgccatggatccgcccagcgacctttcggcggacagcattcgcgacgagaaggtcaaggtcctccgcgccctcgagccgattcccgcagaacaactggcttcgcgcgtggtgcgtgggcagtacaccgccggtttcagcgacggcaaggcagtgccgggctacctggaggaggaacatgcgaatcgcgacagcgacgcggaaaccttcgtcgccctgcgcgtggacatccgcaactggcgctggtcgggcgtgccgttctacctgcgcaccggcaagcgcatgccgcagaagctgtcgcagatcgtcatccacttcaaggagccgccgcactacatcttcgctcccgagcagcgttcgctgatcagcaaccggctgatcatccgcctgcagccggacgaaggtatctccctgcaagtgatgaccaaggaccagggcctgggcaagggcatgcaattgcgtaccggcccgctgcaactgagtttttccgagacctaccacgcggcgcggattcccgatgcctacgagcgtctgctgctggaggtcacccagggcaaccagtacctgttcgtgcgcaaggacgaggtggagttcgcctggaagtggtgcgaccagctgatcgctggctgggaacgcctgagcgaagcgcccaagccgtatccggcggggagttgggggccggtggcctcggtggccctggtggcccgcgatgggaggagttggtatggcgatttctgagttgaagctgccggccggcgtcggcctgcaggtctggggcagcgccgccgagcaggcccgcggcctggccgccgaggtcgccggccggttgcgctcggcgctggccgagcagggccaggcgctgctggtggtgtccggtgggcgcagtccggtggccttcctcgaagccttgagcgaggagccgctggactggtcgcggatcaccgtcagcctggccgacgagcgctgggtgccggagtcgcatgccgatagcaacgccggcctggttcgccgccacctgctccgtggcgaggcggcgaaggcgcgcttcatcggcctctaccagccggcggcgagcctggaggaagcggccgagctggccgaccatcacctgcacgagctgccattgccgatcgacgtgctggtcctcggcatgggcgacgacggccataccgcctcgctgttcccgaacagccctggcctggacctggcgatggatccccaggggacgcgccgttgcctgccgatgtgggcgccgagcgtgccgcaccagcgcctgaccctgccgcgcgccgtgctggcggcggcgaaggtgcagctgctggcgatccagggccagtccaagctggccaccctgaacgccgcgctggcggtcgaggacgaacggcggatgccggttcgcgccttcctccgcgcgccgctgacgatccattggtacccctgagtggcggagctgtagccatgcacaaccttgaacagaagaccgcccgcatcgacacgctgtgccgggaggcgcgcatcctcccggtgatcaccatcgaccgcgaggcggacatcctgccgatggccgatgccctcgccgccggcggcctgaccgccctggagatcaccctgcgcacggcgcacgggctgaccgccatccggcgcctcagcgaggagcgcccgcacctgcgcatcggcgccggcaccgtgctcgacccgcggaccttcgccgctgcggaaaaggccggggcgagcttcgtggtcaccccgggttgcaccgacgagttgctgcgcttcgccctggacagcgaagtcccgctgttgcccggcgtggccagcgcttccgagatcatgctcgcctaccgccatggctaccgccgcttcaagctgtttcccgccgaagtcagcggcggcccggcggcgctgaaggcgttctcgggaccattccccgatatccgcttctgccccaccggaggcgtcagcctgaacaatctcgccgactacctggcggtacccaacgtgatgtgcgtcggcggcacctggatgctgcccaaggccgtggtcgaccgcggcgactgggcccaggtcgagcgcctcagccgcgaagccctggagcgcttcgccgagcaccgcagacactgagactgcccgcctgggcatgcccggcttcggccgggtttttttatgccgtccggattatccggggcatggaacggctaacgtcatcggcgttattcgccgatgcgccggcgttcccgcagatagtcgccgagccggctctgcaggtagggtacggccatggcatgcgcgaggtaggcgtccacctccatcaatcgccagtattgtccttcgtcgccgaagcggatggcctcgaactcgcggtcctccaggcgcgccaccaggaagtaggcgaagggcgcgctgccgctggtgctcggatactgtcgctgccattcgatacgaggttcttccaggcggatggagaactcttcctcgagttcgcgcagggcgcattcggcaggcgtctccaggccctcacggccgccgccgggaaagtcccagtagccggggaagggaatgccgggtttttcgtcgcgtttgtagacgaccaggtggtcgccatagaacagcgccagcttggcgccgctgaagggagggatgtcgtgcaccggggcctccgggtggcggggtgggtgaacccggcctagtctagcgggattgtccgggtttccgcccggggacggtgctttgtcctgacgaagcgcgtatgatgcgcgcccttcgattcgttgccagccacaccgggaggtgcccagatgaacgataccccagagaatccccacgtaccggtcggggaaaaattgcagaaagtcctcgcccgtctcggcgtcggttcccggcgcgacgtagaagtgtggatcgccgaaggtcgggtcaacgtcaatggcagcgtggccagcctcggccagcgggtcgacagccacgatgcgatcaccgtcgatggccacctgatccgccgcgaagaggccgccgagagtgtccgtcgcgtgctgatctacaacaagccggaaggcgaggtctgcacccgcgacgatccggaaggccgcccgaccatcttcgaccgcctgccgcgcctgcgcaccggtcgctggatcaatgtcggtcgcctggacatcaataccaccggcctgctgctgttcaccaccgatggcgaactggccaaccgcctgatgcatccttcctatgagatggaccgtgaatacgcggtacgggtgcgcggcgaggtcaccgaagagatgatcgagcgcctgctcaacggcgtgatgctcgaggacggcccggccaagttcagcgatatccagcaggcgccgggcggcgaaggcttcaaccactggtaccactgcgtagtgatggagggccgcaaccgcgaggtgcgccggttgtgggaatcccaggggttggtggtcagccgcctcaagcgggtgcgtttcggcccggtgttcctgacctccgagctgaccatgggccgctaccgcgaaatggaccagcgcgagatcgacatcctcagcgaggaagtcggcctcaagccggtggccctgccgggcatgaccaccaaggcgcgcgagaaggccgaacgccagcagcgcaagcaggcccgtccgctggcgcgcagcgagcgtccggaagccgggcgcaagcgtgcgccgcggcgcgaggacggcgaaaatgccgctcgtcgcgcgccggcttcgcgtcccgcgcgcggtccgcagccgagcgccgagcgcaaggggcgcgagcagggcactccggttgccgagcggccccgcgagagcaaccgcaagccgcgcccgagcaagccgcgcgacgagcgtccggccagcgcgccgggcgacaagccggcggcccgcaagccgcaggtcaagcggcggccgaaaccggccggcgacggtatgcgtccgggcttccgccgctgagcggaaagcgccctggaaaggccccttcgggggcctttttcatgcctgggaatcggtgtctaatggtcgcccgcacacaaggaggaggtgaaatgcacaggatcctggctatcgcgctctgcatgctatggagcgtcgccgggctggccgcggatgcggcgatgccggcgcagagctgcgcaagccttggcgaggcgacggccggccccgaggacaacttccgtccgccgctggagggcgaggtgatcgacaaggggcgcgcctatttccacagcgcgccgcgtgccgactgtgtcaccggggtcttcgtgattcccggcgacttcatcactgtctacaagccgagcggcgagtggctgaacgtcatgtacgtggctcgagacggcaaggaaaccagcggctggctgctggagaagcgcgtccgcttgcgccaggcctatggcggcccggacgagccggcgcagccataagaggcaggaccttggcggaagccgtgactgcgccggtgagagccgttgctactgccgtcgcccgatgcgcccgctccgcgcttcggggtgtgcgagtcggcaagcctcaggcgcagcgcaggcggttgcggccgtcgcgcttggcttcgtagagcgcctcgtcgacccgtcgcagcaggtcgtcgctgccttcgccgggccgcaggtcggcgcaaccgaggctgatcgacagcttcagcggttcgccggcgtgccggtagtccagttcctccaccgcctggcgcaggcgttcgccgaccatgcaggcagcctgcagtggcgtgctggacagcaggacgaggaattcctcgccgccgaagcggaacaccatgtcgacattgcgcaggtggtccttgatggtttccgccacggccttgagggcttcgtcgccgacggcgtgaccgtagtggtcgttgacccgcttgaagtggtcgatatcgagcatcagcaccgagagcggttgcaggttgcgccgggccagttccagttcgcggccgagcgcctggtccatggcgatgcggttgccggtgccggtcagggcgtcgcgcagggcggtctggatcgcggcgcgatagagcagggcgttgcgcagcgggaacagcagggtgccgagcaggctctccagttgccgttgttcgtcttcgccgaggcgctggcggcgacggaagatcagttcgccgaggtagtcgctgtcatggctcaggcgatagctcaccgaatgcttggcgctgctgccgaactccaggcgcaggtcggagcccggatggcggtagccaagggcgtccagcgggatcagttggcggacttcctcgaagaacaggccgagaatccgctctgcctccaggctgctctgcaactgtagggtcagttgctggcgcaactccgtcaggttgctggcgcgcggcccgctggcgttgccgccgggctgggggccgcgcttctgcttggcggcgtcgaaatcgatggtattggactgcttgggaggagccatgcgcggaacctctggcgcgaaagacggcgacagtagggctaaggcgagtttcgtgccagccaactgaagaacggagaaatcagaggcacagacaggttttcctaggaatggtttccacattctgtaggaatttcggagagatttcgacggaataatggcgttttgctggcgagtggccgaggcgctcgtcggaaagctggcgctccgctagcggagcgccgccatggttcaactgaaggcgttgatgaaccaggtgatcgccgggatggcgacgagatcgatcagtaccgcgccgcacaggggcacgatgatgaaggccttgtgcgagaacacccgatagtgctcgcagaccgcgcccatgttggccaccgcgttgggcgtggcgcccaggccgtggccgaggaagccggcgcagagcaccgcggcgtcgtagttgcggccgagcaggcggaacagcacgaagatcgtcagcagcaacagcaccgcgacctggatgaacagtacgccgagcagcggcaggccgaggttctccagctcccagaacttcaggctcatcatcgccatggtcaggaagatgcccaggcagacgtcgcccagggtgccgacggcgtggtccggaatgcgcagccagccgagacggtcgtcgaggttgcgcaggacgatggcgatgaacatcgccccgacataactgggcagcaccaggcccaggcgttcctcgagcgcgtcgccgagccagaagccgagcaccatcaccagcagcacgcaggtcagcaggcgcagcaggagattgccgtccagcgtggccgccgcatgctggcgtcgctcctgctggccgagggcttccagccgattgtcgctttccgcctgcaccggcaggcggttgcgttcgatcagccagcgcgccaccgggctgccgagcagcccgccagcgaccatgccgaaggtggccgaggccagcgccacggtggtcgcgccctgggcgccgagcccttccgcaaccgggccgaaggccgccgccgcgccgaagccgccttccagcgacaccgcgccggccatgatcccgagcaacgggtcgaggccgagcagtccggcgctgccgacgccgatcaggttctgcagtatcgccagcgcccagcaggccgacaggtagaccagcagggtcttgccgcccttgcgcagcaggccgaggctgccaccgaggccgacggtggtgaagaacgccaccatcaggggcgtctgcatgctggtgtcgaggccgatgtcgagccagccgcgatccctgagcagccagaccaggaaggcgaagccgaagccggcgatcaccggcgacggtacgcacagacgtgtcagccagcggctgcgcttcttcaattggctgccgagggcgagcaggagcagggcgagggcggtggtggacagggcgtccaggtgcaatgtcggcatggcggggctctattgttgttgtgtgggcgaaagggcgatcagttgaccaggctgtcgaccaggcgcgcggcgatccgggcggtgcgctggtcgctatcgagttgcgggttgagttcggcgatgtcggccaggcgcagcttgccgctggccttggcgcggcggaccaggtgctccaccaccggcatctccacgccgtgcgccgagggcgcgctgacgccgggcgcctgggcggccgggagcacgtcgaggcaaacggtcaggtagaggtggtcgacggattgcaggaagctgtcgaggaaggcttcgctgcgttccaggttccatggctgcaactgacggtccagcaggtagcgcacacccaggcgctgggcctggtcgaacagggcggcggtgttgctcaggcggctgatgcccaggcagcagtaggcgaacggccagtcgctggcctggcagagttcggcgatctggcggaacggcgtgccggagctggcccgttcggcgtggcgcaggtcgaaatgcgcgtcgaaattgaggataccgatgcgcggcaggcgctcatgccgactcaagtggcgggcgaggccggcgaagctggcgtaggcgatttcgtggccgccgcccaggccgaccacccggtggccgcgcgcgagcaggtcggcgacgcgttgcgcgtagcattcctgggcggcttccagatcgtcgccggcgacgatgtcgccggcatcgtagatcgcttgctcgccgtgccaggccaggttggccagcgcgcgacgcaaggctggcggtccgtggcgcgcgccctggcgaccctggttgcggcgcacgccttcgtcgctggcgaaaccgagcagcacgctggccgcttcggcgtcgtctgcgtagggacgcatccattggtgccagcgccgcgcgtcggcgccttcctggctatcgatccggccttgccagaggctcatgtcgggggcggggtacatcgaaactcctgttggtcagtccagccgcgcggaaagtcgcgcggcggcgtcgagggtccattgccgcaagcgttcgctgcgcgactgggcgcgcaaggcgggggccatcaggctgagggcgccgtgcaggcgctggcggctgtccagcagcggtacgctgatgccccagacgccttcgtcgatctcgccctggctgacggcgtagccctgttcgcggatcagccggagttcctgctccagcttgtcgatacgctcggcggagagttcctgggcgaggtacagctcctcgcgccgtccgtcctccaggtgcgccagcagggctttggccgaggcgccatgcaacagcggctgcgccagccctttctggtagcagcagcgcagcggctgcggactgtcgaacagttccaggcagatcgcctgctggttgctggccaccatcagcgccacgctctcctggctcaggtcggccaggcgcttgagttccggtttggcgagaccgatcagcgaggcctcgcgatcgaatttcttcgccagttgcaggcaggccgggccgggcaggtagcggccctggccggcctgttcttcggccaggccccagcgcaacagggtcttcaggtgccggtaggtgctgctcagcggctgctccagggtcagcgacagctccttggcagacagggcttcgggcgcctggccgagggcaatgaggatctgcagcaggcgatcggtgggggaatgcttcgacatgggaactccttgacccacagggtgaaggcgatttcccggaaaatgaaaccactttcccactcagtgggaaaaatatgcaaaaagaatgggaagttccggacgggaagagggaagggaaggacagggcagcctcgccgggcggcgaggctgccggggaatcactgggcgtcgaaggcctggccgttgacgccggcgctgtccggccccatgaggtacaggtagaccggcatgatctcctcgccggtggggttgttcagcgggttttccccagggtaagcgagggcgcgcatgctggtgcgggtggcgccggggttgacgctgttggcgcggatcgcgctggtaccgtcgagttcgtcggcaagggtctgcatcaggccctcggtggcgaacttcgataccgaataggcgccccagtaggcgcggcccttccggcccacgctgctcgaggtgaagatgatcgaggcgtcgctggagagcttcatcagcggcagcatggcggtggtcagcatgaacatggcattgacgttcacctgcatcacgcgcatgaagttctccccggaaatctgctgcatcggcgagcgcggaccgaggatcgaagcgttgtgcagcaggccgtcgatgcggccgaactcgttctccagggttgccgccagttcctcgaactggtgcggctgggcggtctccaggttgaacgggatcacggcggcctgcggatggccggcggcctcgatggcgtcgtagacctcgttcaggtactcctcggtcttgcccagcagcagcacggtggcgccgtgggcggcgaaggtcttggcggcggcggcgccgatgccgcggccggcgccggtgaccaggatcacgcggtctttcagcaggtcggggcgggcggagtactggaacatgtcgaatcctttgaatgcatgacccgcctggcggcgggtcgttgtctgtcggcggcgctgcggatcagcagtcgcagagcgcgcggtcgagaacgtcgatgagttcgcgcgggtggtcgacgatcacgtcggcgccccagtgcgcggggttgtcttcggggtggatgtagccgtagcgcaccgccgcggtcttggttccggcgtcgcggccggattcgatgtcgcgcaggtcgtcgccgatgaacagcaccctcgacggatcgatgccgagctggctacaggccagtagcagcggctcgggatcgggcttgctgcgggtcacgtggtccgggcagaccagcaccctggaacgctcggcgtagcccaggcgctgcatgatcggttcggcgaagcgcaccggcttgttggtcaccacgccccagatcaacccggctttctcgatcgccgcaagcagttcggggatgccgtcgtagggccggctgagaaccgcgcaatgctcctggtagcggtcgaggaactcctggcgcaggggttccagttccgggctgtccagcgacaggccgaaggccgcggcaaccatcgcgcgcgcgccgccggagaccacgtcgcgcacctgttgctcgtccaccggcggcaggccgtgggcggcacgcatggcctgggtgatggcgatgaagtccggcgccgtgtcgagcagggtgccatccatgtcgaacagtaccgctttgagccgcatgcgcttcacgcctcccgctgggtctggaccatgtagttgacgtcgacgtcgttggccagcttgtagtgcttggtcagcgggttgtaggtcaggccgatgatgtccttgacctcgagaccggcctcgcgcgaccaggcgccgagttccgacggacggatgaacttgcggaaatcgtgggtcccgcgcggcagcaactggaggatgtattccgcgccgatcaccgcgaacaggtaggccttgggattgcggttgatggtcgagaggaaaacctgtccgcccggcttgaccaggcggtggcaggcgcggatcaccgaggccgggtccggcacgtgttcgagcatctccaggcaggtgaccacgtcgaactgcccgggcatttcctcggccatctgctcggcggtgatctgccggtagtcgacggcgacgccggattccagttggtgcaggcgcgccaccgcgagcggcgcttcgcccatgtcgatgccggtgacgttggcgccgcgctgggccatggcttcgctgaggatgccgccgccgcaaccgatgtcgagcaccttcttgccggccaggccggcgcgctcgtcgatccagttgacgcgcagcgggttgatgtcgtggagcggcttgaactcgctctcgcggtcccaccagcgatgggccagtgcctcgaatttggcgatctcggcgtggtcgacgttgctcataatcgttcccgttgaagagtgaagcctttgggggaagggccgcggcggcggaatccaatccttcatgttgccagctttggcggagggatggggccggcggcggttcgccttcctatgtcagtttatcgcagcgggccggcccgccgcggttcaggacctgtcgctggcggcgatcttcgccccccattcgcgggccctggcgatcaggcgctgttcgtcgtgacggagcaggcggccgtcgtcgaggagttgcctgccgccgacccagacgtgccgcacgcagtcgcggccgctggcatagataagttgcgaaaccgggtcgtagaccggttgctgggccaggccggacagatcgaaggccaccaggtcggcggccttgccggcttccagggagccgatcaggcgctccaggccaagcgcgcgggcgccgttcagggtggccatgcgcagcgcgcggtgggcgtcgagggcggtggcctggccgtacacggccttggccagcagcgccgcggtgcgggtctcgccgagcaggtcgagatcgttgttgctcgccgcgccgtcggtgccgatggccacgttgaccccggcctgccagagcttttccaccgggcagaagccgctggccagcttgaggttggattccgggcagtggatcaccgaactgttggtttccaccaacatcgccaggtcgtcgtcgtccacctgggtcatgtgcaccgcctggaagcgcgggccgagcaggccgaggcggtgcaggcgggccaacgggcgctcgccgttgcgctccatggcctgctccacctcgaaggcggtctcgtggacgtgcatctggatgctggcgtcgagttcctcggtgagcaccaggatctgctccagcttgtcgtcgctcaccgtataaggtgcgtgcgggccgaaggcgatgcggatgcgcgggtggtgcttgaggtcgtcgaacagcgccatgccctggcggatcgcctcggcgctgtcgcgggcgccggggatcgggaagtccagtaccgggatcgccacctgggcgcgtaccccgctgtcatggaccacgccgcagatagcctgtggatagaagtacatgtcggagaaacaggtgatgccgccctttacctgttcggcgatggccagctccgtgccgtcgcggatgaaatcctcgctgacccattggccttcggccggccagatgtggtcctgcagccaggtcatcagcggcaggtcgtcggcgagaccgcggaacagactcattgccgaatggccgtgggcgttgaccaggccgggggcgagcagcatgccgggcaattcgcggatttccgtggcgccatggcgcatggcctgctcgcgcggcgcgaccagggcgatctggccgtcgcggatgcccagcgcgtgatcgcgcagcaccaccccggcgggctccacggggacgatccaggtcggcagcaggaggaggtcgaaggggttacggacgttgggcatggcggcgcatcctgggcgcagagcgggaagccggaagtatacccgagcgtccgcggctggggctcgttataatccgcagcttttccgtgattcagcgagaggtgtgtgcatgcgagagcgactgctggcggccgagcgggtcaaggcgatcgagtggcgggacggtacgctgcggttgctggatcagcgcctgctgccccaggaggaggtctggctcgaacatgagtcggcggccgaggtggccaaggccattcgcgatatggttgtgcgcggcgcgccggccatcggcatcagcgccgcctacggcatcgtccttggcgcccgcgcgcgcctggcgcagggcggcgactggcgcgccgcgctggaggaggacttccgcctgctggccgactcgcgacccacggcggtcaacctgttctgggcgctgaaccgcatgcgcgaccgtctggagcgaatgaaagagggcgaccagccgctggcggtgctggaagccgaggcgatctccatccatgaaagcgaccgcgaggccaacctgaccatggcccagttgggcatggagctgatccgcaagcagcagggcagcccgcagaacatcctcacccactgcaataccggcgccctggcgaccggcgggttcggcaccgcgctgggggtgatccgcgccgcgcacctggaaggcctggtcaatcgcatctacgccgacgaaacccggccctggctccagggctcgcgactgaccgcctgggagctggccaacgaaggcatcccggtcagcctgaacgtggattcggccgccgcgcacctgatgaagaccgaaaacatcacctgggtcatcgtcggcgccgaccgcatcaccgccaatggcgatgtcgccaacaagatcggcacctaccagctggcggtcaacgccatgcaccacggcgtgcgcttcatggtggtggcgccgagttcgaccatcgacatgaacctggagagcggcgaggacatcccgatcgaagagcgcgacggtcgcgaactgctggaaatcggcgggcgacgggtggcggccgaggtcgatgcctacaatccggtattcgacgtgaccccggcggaccttatcgatgccatcgtgaccgagcgtggcgtcgtcgagcgtcccgacgccgagcgcatggccgccctgatgagccgcaagcgcctgcattgaacgaggcgactggaggtcgtccccgccagggcctttgccttgggctggggcgtgggctgtggtaagctccgacggttattcgagcgccccgcggaggggcctcgagagtgcgcgaatccttgactcaagtcgttgatttgtagtgagttggcgctgctcgggcatgcgccgacctacttcgtttgcctcaggatcgaggcggcgaagttccaccagaaaaaggaaccaggcttctcatgggcgaactggccaaagaaattctcccggtcaatatcgaagacgagctgaaacagtcctatctcgactacgcgatgagcgtgatcgtcgggcgggccctgccggatgcacgtgacggcctgaagccggtgcaccgccgtgtgctttatgccatgagcgagctgggcaacgactggaacaagccctacaagaaatccgcccgtgtggtcggcgacgtgatcggtaagtaccacccgcacggcgacaccgcggtctacgacaccatcgtgcgcatggcgcagccgttctcgctgcgctacatgctggtagacggccagggcaacttcggttcggtggacggcgacaacgccgcagccatgcgatacaccgaagtgcgcatggccaagctggcccatgaactgctggcggacctggaaaaggaaaccgtcgactgggtgcccaactacgatggcaccgagcagatcccggcggtcatgccgaccaagattcccaacctgctggtcaacggttccagcggtatcgccgtgggcatggcgaccaacatcccgccgcacaacctcggcgaagtgatcgacggctgcctggcgctgatggacaaccccgacctgaccgtcgatgagctgatgcagtacatccccggtccggacttccccaccgccggcatcatcaacggccgcgccgggatcatcgaggcctaccgcaccggtcgcgggcgcatctacatccgtgcccgcgccgtcgtcgaggagatggagaagggcggcggtcgcgagcagatcatcatcaccgagctgccgtaccagttgaacaaggcgcggttgatcgagaagatcgccgagctggtgaaagagaagaagatcgagggtatttccgagctgcgcgacgagtccgacaaggacggcatgcgcgtggtcatcgagctgcgtcgcggcgaggtgggcgaggtggtcctcaacaacctctacgcccagacccagctgcagagcgtgttcggcatcaacgtggtggccctggtcgacggccagccgcgcacgctgaacctgaaggacatgctcgaagtgttcgtccgccaccgccgcgaagtggtgacccggcgtaccgtctacgagctgcgcaaggcccgcgagcgcgggcacatcctggaaggccaggcggtcgccctgtcgaacatcgacccggtgatcgagctgatcaagagttcgccgaccccggccgaggccaaggaacgcctgatcgccactgcctgggagtccagcgcggtggaagcgatggtcgagcgtgccggcgccgacgcctgtcgcccggaagacctggatccgcagtacggcctgcgcgacggcaagtactacctgtcgccggaacaggcccaggcgatcctcgagctgcgcctgcatcgcctgaccggcctggagcacgagaagctgctctccgaataccaggaaatcctcaacctgatcggcgagctgatccgcatcctgaccaacccggcgcgcctgatggaggtgatccgtgaggagctggaagcggtcaaggccgaattcggcgatgctcgccgcaccgagatcgtggcttcccaggtcgacctgaccatcgccgacctgatcaccgaggaagaccgcgtggtgaccatctcccacggcggctacgccaagtcccagccgctggccgcctaccaggcgcagcgtcgcggcggcaaaggcaagtccgccaccgggatgaaggacgaggactacatcgaacacctgctggtggccaacagccatgcgaccctcctgctgttctccagcaagggcaaggtctactggctgcgtaccttcgagattccggaagcctcgcgtaccgcgcgtggccggccgctggtgaacctgctgccgctggacgagggcgagcggatcaccgcgatgttgcagatcgacctggaggcgctgcagcagaacggcggcgccgatgacgacctcgacgaagccgaaggcgcggtgctcgagggcgaggtggtcgaggccgccgaggtcgaggaagtcgagggcgagaccgccgagctggtggccgagccgaccggcgcctacatcttcatggccaccgccttcggtaccgtgaagaagaccccgctggtgcagttcagccgtccgcgcagcagcggcctgatcgcgctcaagctggaagagggcgacaccctgatcgccgccgcgatcaccgatggcgccaaggaagtcatgctgttctccagcgccggcaaggtgatccgcttcgccgagagcgtggtgcgcatcatgggccgcaacgcccgcggcgtacgcggcatgcgcctgggcaaggggcagcagctgatctccatgctgattccggagtccggggcgcagatcctcaccgcctccgagcgcggcttcggcaagcgtaccccgctgagcaagttcccgcgtcgcggccgtggcggccagggggtgatcgccatggtcaccaacgagcgcaacggcgcgctgatcgccgcggtacaggtccaggaaggcgaggagatcatgctgatttccgaccagggcaccctggtgcggacgcgtgtcgacgaagtctccctgtccggccgcaatacccagggcgtaaccctgatcaagctcgccagcgacgaggtactggtcggtctggagcgtgtccaggagccgtcgggcggagatgacgaggacctgcccgaaggggaggaagctgccgaatctctgggcgagtcggccgagtccgagtccgagcccgcggcggaagcggaaggcaacgaagagtaaggctcggggcgggcgcctgcgcccgcccggccgatgacgtcggcggataactcacggctatccgccctacctatagcgagagtggatgtgagcaagcgagccttcaatttctgcgccggtcccgcggcgcttcccgacgcagttctgcaacgtgcccaggccgagcttctcgactggcggggcaagggcctttcggtcatggaaatgagccaccgtagtgatgactacgtggccatcgccagcaaggccgagcaggacctgcgcgacctgctcgacattccctcggactacaaggtgctgttcctgcagggcggcgccagccagcagttcgccgagattccgctgaacctgctgcccgaagatggcgtcgccgactatatcgataccggtatctggtcgaagaaggccatcgaggaggctcgtcgctatggcaccgtgaatgtcgcggccagcgccaaggagtacgactacttcgccattccgggtcagaacgagtggacgctgaccaaggacgcggcctatgtgcactacgcctccaacgagaccatcggcggcctcgagttcgactggattcccgagaccggcgacgtgccgctggtcaccgacatgtcctccgatatcctctcgcgcccgctcgacgtgtcccgcttcggcctgatctatgccggggcgcagaagaacatcggcccgtccggcctggtggtggtgatcgttcgcgaagacctgctcggccgcgcccgcagcgtctgcccgaccatgctcaactacaagatcgccgcggacaacggttccatgtacaacaccccggcgacctactcctggtacctgtccggcctggtcttcgaatggctgaaggagcagggcggggtgaccgcgatggagcagcgcaaccgcgccaagaaggacctgctgtacaagaccatcgatgccagcgacttctacaccaacccgatccagccgagcgcccgctcctggatgaacgtgccgttccgcctggccgacgagcgtctcgacaagccgttcctggaaggcgccgaggcgcgcgggctgctcaacctgaaaggccaccgctcggtcggcggcatgcgcgcttccatctacaacgcccttggcctggacgcggtcgaggcgctggtcgcatacatggcggagttcgagaaggagcacggctgatggcggaccaggaccagctcaaggccttgcgcctgcgcatcgacagcctcgacgagaagttgctcgagctgatcagcgagcgtgcccgttgcgcccaggacgtggcgcgagtgaagacccagaccctgggcgagggcgaggcgccggtgttctaccgtcccgagcgcgaagcctgggtgctcaagcacatcatgcaattgaacaaggggccgctggacaacgaagaggtcgcgcggctgttccgcgagatcatgtcgtcctgcctggcgctcgagcagccgctgaaagtggcctatctcggacccgagggcacctttacccaggccgcggcactcaagcatttcggcaatgcggtgatcagcacgccgatggcggcgatcgacgaggtgttccgcgaggtcgccgccggcgcagtgaacttcggcgtggtgcctgtggaaaactccaccgagggggcggtcaaccataccctcgacagcttcctcgagcacgacatggtgatctgcggcgaagtcgagttgcgtatccaccatcacctgctggtcggcgaaaccaccaagaccgacaacatcacccggatctattcccatgcccaatccctcgcgcaatgtcgcaagtggctggactcgcactacccgagcgtcgagcgggtggcggtgtcgagcaacgccgacgcggccaagcgggtgaagagcgagtggaattcggcagcgatcgccggcgacatggcggccagcctgtacgacctgagcaagctgcacgagaagatcgaggaccgcccggacaactccacgcgcttcctgatcatcggcaaccaggaggtgccgccgaccggcgacgacaagacctcgatcatcgtttccatgcgcaacaagccgggggccctgcacgagctgctggtaccgttccacaacaatggtatcgacctgacccgcatcgaaacccgcccgtcgcgcagcggcaaatggacctacgtgttcttcatcgatttcgtcggccaccataaagaaccgctgatcaaggacgtcctggagaagatcggccaggaagccgtcgccctgaaggtcctgggctcctatccgaaagcggtgctctgagcgcgctgtcattccgaagagacgggtcatcgatgaatgccccgtcccgcgtcgaggctgaactatccatgtccgatttccttgccctggcccagccgggggtgcaaaagctgtcgccctacgtccctggcaagccggtggatgaactggcccgcgagctgggcatcgaccctgcggcgatcgtcaagctcgccagcaacgagaaccctctgggtgcgagcccaaaggcgctggaggctatccgcgccgaactggcggaactgacccgttatcctgacggcaacggtttcgaactcaagcgcaagctggccgagcgttgcgcggtggatgcggcgcaggtgaccctgggcaatggctccaacgacattctcgacctggtcgcccgtgcctacctcgcgcctggtctgaacgccgtgttcagcgaacatgccttcgccgtctacccgatcgccacccaggccgtgggcgccgaggggcgggcggtcaaggcgcgcgcctgggggcatgacctggaagcgatgctcgccgccatcgatgggcaaactcgcgtggtgttcgtcgccaacccgaacaacccgaccgggacctggttcggtgcggacgccctggagcggttcctcgcccaggtgccggcagaggtgctggtggtgctggacgaggcctatatcgaatacgccgagggcgacgagctgcccgatggcctggactacctggcgcggcaccccaacctgctggtctcgcggaccttctccaaggcctatggcctggcttcgctgcgggtcggctacgcgctttcgagcaaggcggtggccgatgtgctcaaccgcgtgcgccagccgttcaatgtcaatagcctggcactggcggctgcctgcgcggcgctggacgaccatgactacctggcgcagagtcgccgcctaaacgattccggcatggcgcagctggaggatggcttccacgcgttgggcctgtcctggattccctcgaagggcaacttcatcgccgtggatctggctcgcgatgccggtccggtctaccaggcgctgctgcgcgaaggtgtgatcgtgcgtccggtggctggctacgggatgccgaccttcctgcgcgtctccatcgggctgccggaagagaacgatcgtttcctccaggcgctgggcaaggtgctggcgcatgactgaggtcacgccgctgcaacagtcgacccctaagctgggccgcctggtggtggtggggctgggcctgatcggcggctccttcgccaaggggttgcggagcaaagggttgttccgggaagtggtcggcgtggatcgggatgccgagtcttgccgcctggcggtggagctcggcgtggtcgaccgttgcgaggaggatcttggccgcgcctgcgtcggcgccgacgtgatccagttggcggtgccgatcctggcgatggagcgggtgctggctgacctggcgaagctcgacctgggcaaggctgtattgaccgacgttggcagcgccaagggcaatatcgtgcgtgccgcgcgtgtcgcgttcggcgggatgccgcggtacctggtaccggggcatccgatcgcgggttccgagcagagcggagtgaccgcggcgaaggcgaccctgttccgccggcacaaggtgattctcacgccctccgcggagaccgatgccgacgcgctggcgctggtcgacagcctgtggcgcgcgctgggcgcggacgtcgagcacatggaggtcgagcatcacgacgaggttctggcggccaccagccacctgcctcacctgctggccttcaccctggtcgactccctggccaagcgcagcgagaacctggagatcttccgctatgccgccggcggtttccgtgatttcacgcggatcgccggcagcgacccggtgatgtggcacgacatctttctcgccaatcgcgaggcggtgctgcgtacactggatgtttttcgtgacgacctcgacgcgctgcgcgaggccgtcgacactggggacgggcaccagttgttgggcgttttcacgcgcgcccgggtagcccgtgagcatttcagcaaaatcctggcccgtcgggcctatgtggacgccatgcacaacaacgacctgatttatctggcccagccgggcggcagcctgtccggaaccatccgggtaccgggcgacaagtcgatttcccatcgctcgatcatgctcggctccctggccgaaggcaccaccgaagtggagggcttcctcgagggcgaggacgcactggcaaccatccaggcgttccgcgacatgggagtggtgatcgaggggccgcagaacggccgcgtcaccgtccatggcgttggcctgcacggcctcaaggcgccgcctgggccgatctacctgggtaactccggtacttccatgcgtctgctcagcggtctgctggcggcccagccgttcgacagcaccctgaccggcgacgcttccctttccaagcggccgatgaatcgcgtagccaagccgctgcgcgagatgggcgcggtaatcgagacggggccggaaggccgtccgccgatgaccattcgcggcggccagcgcctcaccggtatgcattacgacatgccgatggccagcgcccaggtgaagtcctgcctgttgctcgccgggctctacgccgcgggtgagacctcggtcaccgagccggcgccgacccgcgaccacaccgagcgcatgctgcgcggcttcggctatccggtggtggtcgagggcagcaccgccaaggtcgaatccgggcacaagttgagcgccacccatatcgaggtcccggccgacatttcctcggcagccttcttcctggttgccgccagtatcgccgagggttcggaactggtcctgcagcacgtcggcatcaacccgacgcgcgtcggcgtcatcgagatcctgcgcctgatgggtggtgacctgagcctggaaaaccagcgcgaggtcggcggcgagccggtcgccgacatccgcgtgcgctccgcgcggctcaagggcatcgacattcccgaggacctggtgccactggccatcgacgagttcccggtactcttcgtggctgccgcctgcgccgaggggcgcacggtcctgcgtggcgccgaagagctgcgggtcaaggagtcggaccgtatccaggtcatggccgacggcctgaaggccctgggcgtgaaggccgagccgaccccggatggcatcgtcatcgagggtggtgcgttcggtggcggcgaagtctgggcgcacggcgaccaccgtatcgccatgtccttcagcgtcgcttcgctgcgtgccagcgggccgatccgcatccacgactgcgccaacgtcgccacctccttccccaacttcctcgccctgtgtgcccagaccggtatccgggtcgccgtggagaacaattgatgaacggcgctgtaccgatgctcgccatcgatggccccagtggcgccggcaagggcacggtcgccgggctgctcgcccggcgcctgggctggaacctgctggattccggggcgctttatcggctgttggcgttcgccgcggtcaaccatggtgtcgacctgaccaatgaagaggcgctgaaggtcctggctgcgcacctcgatgtgcagttcgtcgccgccgatggcagccatgggcagcgcatcattctcgaaggcgaggaagtgaccgatgtgatccgtaccgagcaggtcggtgccggcgcttcccaggtcgcggcgctgccggccgtgcgtgatgcgctgctgcagcgccagcgggcgtttcgcgaggctccgggactggtggccgacggccgcgacatgggcaccgtggtatttcccgatgcgcctctgaagatcttcctcaccgcctcggcggaggagcgtgcgcgtcgacgctacctgcagttgaaggcgaagggcgcggatgtcgaccagtctgccttgctggaagaaatccgcgagcgcgacgagcgcgacagccagcgcgcggtcgcgccgctgaaaccggccgatgacgcgatcctgctggactccaccgaaatgagcatcgaggcggtggtcgagacgatcatccggcactgcgagcggcagggctgggacgtctgaggtttcggcgcgggaattgacgatatagggcctggttgctaatattccagaccttatgttgtggcgttttgcaggtgtggcgagggttgcctcccgacttgcctggcgccatcgcagaacaacccaactgggcattcccattcgggagtgcaatcagaagctagcaggaaaccagcaaattgtcctgcggcttcatttaatgacttgaccgcattggctggtgatgcggaatcgggcccttccgggcctttgactacaggtatgaacatgagcgaaagcttcgcagaactctttgaagaaagtctgaaatccctcgacatgcagccgggtgccatcatcaccggcatcgtggtcgacatcgatggtgactgggtcaccgtccatgccggtctgaaatccgagggcgtcatcccggtcgagcagttctacaacgaacagggcgagctgaccatcaaggtgggtgacgaagtccacgtcgcactggacgcggtagaagacggctttggcgagaccaagctgtcccgcgagaaagccaagcgcgccgagagctggattgttctggaagcggctttcgctgccgacgaagtggtcaagggcgtcatcaacggcaaggtcaagggcggtttcaccgtcgacgtcaacggcatccgcgcgttcctgccgggttctctggtcgacgttcgtccggttcgcgacaccacccacctggaaggcaaagagctcgagttcaaggtcatcaagctcgaccagaagcgcaacaacgttgtcgtttcccgccgcagcgtcctggaagccgagaacagcgccgagcgtgaagctctgctggaatcgctgcaggaaggccagcaggtcaaaggtatcgtcaagaacctcaccgactacggcgcattcgtggacctgggcggcgtagacggcctgctacacatcaccgacatggcctggaagcgcatcaagcatccgtccgagatcgtcaacgttggcgacgagatcgacgtcaaggtcctgaagttcgaccgcgagcgcaaccgtgtatccctgggcctgaagcaactgggcgaagacccgtgggttgccatcaaggcgcgttacccggaaggtacccgcgtcatggcccgcgtcaccaacctcaccgactacggctgcttcgccgagctggaagagggcgtggaaggcctggtacacgtctccgaaatggactggaccaacaagaacatccatccgtcgaaagtcgtccaggttggcgatgaagtggaagttcaggttctggacatcgacgaagagcgtcgtcgtatctccctgggtatcaagcagtgcaaatccaacccgtgggaagacttctccagccagttcaacaagggtgaccgtatctccggtaccatcaagtcgatcaccgacttcggtatcttcatcggtctggacggcggcatcgacggcctggtccacctgtccgacatctcctggaacgaagtcggcgaagaagccgtacgtcgcttcaagaagggcgacgagctggaaaccgtcatcctgtcggtcgatccggagcgcgagcgcatctccctgggcatcaagcagctggaagacgatccgttctccaactacgcgtccctgcacgagaaaggcagcatcgtccgcggtaccgtgaaggaagtcgacgccaagggcgctgtcatcagcctgggcgacgacatcgaaggtatcctgaaggcttccgaaatcagccgtgaccgcgtcgaagacgcgcgcaacgtcctgaaggaaggcgaggaagtcgaagccaagatcatcagcatcgaccgcaagagccgcgtcatcagcctctccgtcaagtccaaggacgtcgacgacgagaaggacgcaatgaaagaactgcgtaagcaggaagtagaaagcgctggtccgaccaccatcggtgatctgatccgtgctcagatggagaatcagggctaagtctctgatccatcatgaaaaagggcggcctaggccgccctttttcgttttccccttcttggacctgttcaaagactgatcagcatgctaaaagagacctgagctgatctagccgcttgaaaaagaagggaaaaccatgaccaagtcggagttgatcgaacggatcgttacccatcaggggcaactgtccgcgaaggatgtcgagttggcaatcaagaccatgctggagcaaatgtcccaggccctggcgaccggggaccggatcgagatccgtggcttcggcagcttttccttgcactaccgcgccccgcgcgtcggtcgcaaccccaagaccggggagtcggtacgcctcgacggcaagttcgtgccgcacttcaagccgggcaaggagttgcgggatcgggtcaacgagccggagtgatatcggttcgatcagcgttatagagggatttccatgcaatggttcaggcgatctgccgctgtagcggttctactggtggtatctatcgcagtcgtggttttcgtgctggaaaaccaaggagtggtccagttggccttccttggagtccagtttcctcaatggcctctggccgtctatatcatcattgccttcatccttggtgggttgctgggactggctgcccagctaccgttcctgaccatatcgcgtgtgcgagccagtagcttgcgcgccgagcttgtacaagctcgtaaagaggtcgacaccttgcgcgcggaaccttcgaaagtttcctgaaactgatatttctgcttggcttgaaacgcgcatttcagcggtaggcgccggagagaaggcaactaattgtggggcgtcctgtctactcagattcttcattctatgatgaaggacctgcatgccagcacccgatggccatggagcgcgaccccagcttgtaatctccgagcatgctgtcagaatgcgatccatttgccaggcgggtttcagggcttttagtggcttaccacaaaacagtgaagagtataggttgaactgtgacagacggcattgactcgcgacagatgtccaagcgtaacgaaatcgactttatcgagctcattcaagggctttgggcacagaaatggctcgtcctttccctgacctttctaggtgcggttctggcggggagctatgcatttctaagcaagcctgtatacgaggctcgggttgccgttttgccgccatcccttagcgatgttgcggggttcaacatcgcgcgcagtcgagacagcggtcttccaccttttaccgttagccaggtttactcggtgttcacccgaaatctacagtccgagggaacgcgacggcagttttttcgcgaggtatatctgccctcccttgaagagcgagtgggctcggtggatgggctgtacagggcgttttccgacgatgtgagcgtgaatcagccgaccaaggagctaccggagcggtacaccgttgtgtttgaccgacacgatcctgaacaagctgcaaaatgggcgaaacaatacatcgaactggccgcccagcgttcgatggatgaaatgcgcggcaatgcccagcgcgagctcgaggtgaagagtcgcaacatccagcagcagatcgacactctacggcaggtggtcaaggagcgacgcactgaccgcatcgttcgtctgaaagaagctttgcaggttgccgaagctgttggtgtagaaaagccgccactcattggttcgcagatcgatcagcaattgtcggccatcatggaaggcagcctcatgtatatgagggggtcgagagctcttagggccgagatagaagctttggaggctcgtacatcggacgatccattcattcctgcgctgcgtggtctgcaggagcaactcgctctgtatgaaagcaaacaactgagttttgatagagttgcggtcttccggcaggacggaagcgtagaaacccccgatgaccccataaaaccgagaaaggttctcattctggccttaggtattctggctggtggtgtactgggtgtattggccgccttgctccgtctcctgtttcgtgagaagcgactcgatctaacgggctaagggtattcccggtagggtaaacaaaaggacttgatatgcagaagtgagtgggtttccaggcacggtcttctcgttgaagaagaccgtgcgttgttctttcttttcgcggatatcaatcagatccccggcttatagctgtttcaggaggggcgctgttcgcgaatggcgttatagatattttcgagtggggcggtaatgcggaagaagactctttgtgtgtttggcactcggccggaagctattaagatggccccagtcactctggcattggctggcgatgaccgtttcgaggcgcgggtgtgcgttaccgggcaacatcgcgagatgcttgatcaggtcctaaatctcttcaagatcgtccctgacttcgatctcaatattatgcgtacaggtcaggatctgactgatatcactgtcgccattctgcaaggaatgaaagaggttttcgcccagttcaaacccgatattatccttgtccacggcgatacagccaccacattggctgctagccttgcggcctattaccatcaaattcctgttgcccatgtcgaagcaggtttacggacagggaacatgtattcgccctggccagaggaaggtaatcgcaaattaaccggagccctggcctgtctccatttcgctcccaccgagacctccaaagacaatctgctcagggaagggatagcggccgaacagatcgttgtgacaggaaataccgttatcgatgcattgctgagtgttgtccagcgattaagacacgatgtggtgcttgctcgccaagcggcggctccgaccgagtttctcgattcctcccgcaagttcgtcctcgtcaccggtcatcgccgcgaaagcttcggaggaggtttcgagagaatctgccgggccttggccgaggtcgccagaaatcacccggagatcgatatcgtctatccggttcacctgaatccgaacgtacgggaaccagtaaatcggcttctctccggtgtcgagaatattcatctaatagagcctttggactatctgcctttcatccacttgatgagccgtgcccatatcatcctcaccgattccggtggaattcaggaagaagctccctcgttgggcaagcccgttctggttatgcgtgagacgactgagcgacccgaggcggttgccgcagggaccgtcaagctagtcggaacggaagtcaagaatattgtgaatgaactagaacgtctactgacggacgagtccgcttatctgcaaatgagttttgcccataatccatacggtgatggagaggcatgccagcgtattgttcaggctttgttggtttaagtctaagtattattttggaaaggataggttgatgagtttccagactatttccgtaattggacttggttacataggtcttcccaccgcagctgttttcgcttctcgacagaaaaaagtgattggtgttgacgtcaatcaagcggcggttgataccatcaatcgaggagagattcatatcgtcgaacctgatctagacatggtggtgcatgctgccgtgacagagggttatctgcgtgcgaccaccaatcctgagccggccgacgcattccttattgccgttcccaccccattcaagcatgagcacgagcctgatctcactttcatcgaggctgccagcaaatctatcgcacctgtactgaagaagggtgatcttgtcattctagagtctacctctccggtaggcgctactgagaaaatggccggttggttggctgagtttcgtccggatctcactttcccgcagacacatggagaggcttcggatattcgggtcgctcattgcccggagcgtgttcttccggggcatgtattgcgcgaactggtagagaatgatcgggtgattggtgggatgtcggaaaagtgctcagaggcggcatcacggctttacaaaatcttcgtgaaaggcgaatgcattatcaccaatgctcgcaccgctgaaatgtgcaagttgacggaaaatagcttccgtgatgtcaatattgcgttcgcgaatgagctgtcgattatctgcgacaagttggatatcaatgtctgggagctcattcgtctggccaatcgtcatcccagggtgaatatcctgcagccgggtccgggagtcggagggcactgcatagccgtcgatccctggttcattgtaagcaagacacctgatgaagctagactgatccggagcgctcgtgaagtcaatgatcataagcctttctgggtcttggagaaaataaagctagctgtcgcagatgttcttcaaaaacagcctgagaagactgctagggatgtgtccgttgcatgtttcggcttggcattcaaggcaaatatcgacgaccttcgtgagagcccggcaattgcaatcgcgcagcaggtcgttgcgtctcatccgggccgagtacttgtagtggagcccaatatcgaggagctcccgggaaaattctcgggaaacttgactcttgcttctactgactcggctatgcaggaggcggatgtcgtggttcttcttgtggatcacaaagaatttcgagagatcgctccacatcctcgccaactcgtagtggatacgcgaggtttgtgggaggcttgagtttctcttgagaaaatattcgagcagataggctttgctagacgagggggcgaataaggaacccccctctattggggtcttctgttgtgttgtcgaaagcgtatcgcaggctttccaaattgaagaggtgggtttgagccttttaaagaattccttctccaacctgattggctcagctcttcccgctgtggtcgcattgccggcgctggggtatatggcgcgggagctggagacagcccttttcggagctgcaatgctgatatgggctttggttgggtacgcaagtattttcgatgctgggctcggtaagtcagtggtaaggcaaattgccatctcctcagcggagcctgaaaaacgaggaccgatcctaggctcttccctgctgtttgttcttctctcgggggggctggcggctgcattggtccacttttttgcggaatatttggttgtagatatattcaaggttgatcgttcctcctatgaggatgccttgacgggaactcgagtggcggccctgtgtattcccttctttttagcatccttggtattacagggttatctcgagggggtggaggatttttattcttttaataagtatagggctctatcaggaactcttacttatcttcttccggtagcctttttactatttgagaagaccttttcttcattgatctatgggctgctttttgcgcgggctggttcttgctttctgattgcattaattgtttcgcgtcgttgttcagtttggacgtggcggtgggatgttaaggtctttaaaacgcttataagctttggtggttggctgactattactaatataattagtcctgtcatggtctatatggataaattcctgatagcaagaattacgggggcaggagagcttgcatattatgctgcaccatccgagttgataaatcgtatgtctattctgcctgtagctattacgcgtgcagtatttcctcgtttatctgctttgggggggcagggatctgcctctgtgaagagacaggctctcctttattctggaggattggttctacctataattattgttctattttttgtagcgccttggggcatgggcatatggttgggtccagagtactcggggacggctgctcaggttttccagatcatgcttgtaggttatttgttcaattcgattgcactagttccatataataatctccaggcgaagggatattctcggacaacagcaatggtgcatctcttggaggtgcttccttatttgatgctgatgtacttttcggttcagcaatggggggttgtcggagcggcatccatctggtccttaaggatggctgtggactgcattttgatggcttatctggactcgaagtgacgaatcatggctagctattatatagaaaactctttgaaattcttgttttttgtcctgttgaccttgatgctttcttttcccaagtcatttgcagttataaagatagtaattcttgcttttatgttttcaatggtttttttacatatcgttcttggtggggttagaagattttctctggatattatttttttctatctggtgttcattttgctggctgtaatttggttgatcgtcgggcttctgaatgatggctatgcgatcgcattaggtgatgctttcaggttgtatgtggtcttttcgttgatatttttggttctttatctctggttggagaatttcgattatctacccttgattttttcttcgatcatggtttccacgataatcatatttgctttctgtttcttgtctattttcgaggcgctgtattcggtcagtctcttccccgaatttcttcgcgttgaattaaatgtcatggctggtgtgcatgaggggcattttcagctcggaaataatagtgtaaattcgctattctttactgttccttttcttttgtctgcgcttgtgtgctctagcgagctttccaagagatataggtttcttttctttgtctccttggttcttggagtgatcgccgttctcctagctggtagaagagcccttatgttgattctattgatggttccgtttcttgccgtattctttcggcggattagcggtgtttcctccatcgagggtgggagaggggttgggaagattatcttcgtatttaccttttttgctgtttgtgtgggaggggtcattcttttggctggcctgaacgtaaatcaggccgcagagcgtatcgagagtgcctttgcaggtgatagcgtcagggtggatcaattcatttccctctggaagggattcaccgattctcctcttctcgggtctggcttcggtggatctgtcgatgtcattcgaagcgaagagcggccttggatgtatgagctttcctatatgcagttacttttcaatggtggtttactggggttttctctgattactggatgcattggcttcttctatctgaaagcattgtttgtgataaagaatttttccctttacagggcagaggccatatccactcttgttggcgtattggttttttgcgtgggaagtgctaccaatccttatttttcgggatttgactctctgtttcttttaggtttcatcccgctcattgctagcgtggggaaggtgtatgcgcattcgtgaagcttcaatcctaaaatccaacagggttgatcccatactggtggtactgctgaactggaacgggtggcaggatacaatagagtgccttgagtctttacggcatctggagcagccgcaggatatcttggtattcgacaatggctccgagaatgattcagtctaccaacttgaggagtacttgcgctctatctcgattgcgcaacacgaggaggctttcgagttagatgggcatgttctgcacatcgtccactatgatgtctctggtattgtttataggctgtgctctcttggggagaatctaggtttttcggctggatgcaatttggctgtcaagtacgctgagagtatgagctatgtgtatgctctcttgctgaacaacgataccgtgttggagtcagattccttacggataatgcatgaggttttttcggatgtctcggcagatatcgtcattccgcaaattcgttatttcgataggcccgaaattatatggaattgtggaggagaggttagtcgctgggggcgtgttcgttattacttttccggaaaaaatggcacttacttggaaataaaagaagcctttccggtcggctttgctaccggctgttgcatgctcttcaaggttgacttcttcaggtctatcggtgggtttaccgagcagtttttctttggcgaggaagatgtagagttgagtttcaggcttcgtcgaagaggatctcatgtcgtttgcgcagcacgtgctattatttatcataaggtaggtgccagcatccgaggaaaagacgagcttatttttcgcaagacgttcattcactacttgaatcgctttatcaatatgcgcactcagttgcctgtcgccgtctggaacgcttggcggttcctgatcgttttcaaggtagctatcactctgagaaagaatttcggcaagtcctcaggtgaaattctcgctttcatacgtctccttatgcgccagtcttcgcgtttgccgggggtcgacaaagctctattcaagagcgtattgagcaaggggttggattacaacgatggttaatgcaggaagatatatcattgtcatcggtggttttcccgatccggtaggcggtgtgactgcatttgtcagtcgcttggctgagaacaatatggtttcagaggttatcgacatatacccctcgcccagcaaaagcgtaccttccgaattcaagggtagagtggtttttcgtaaaggatttacgggattcctgtcttattatcttgccaatcatcgtcagtgggccggcaggctgttgcacttcaatttttccacgtctagggctatagttttctttctcgtccttccaaagttcgcttctgaattctctttaatgcttcatcatggaagcctacaggtgaaaagtagcaggaagtggctgtatcgggcagctctttccagacttgactatgtgttttgtatgaatgaggggcatcgccagttctatcgaggtctgggggttcccgaagagaaaatgcggctggtcagttcctatataaagatacctcctctttcttcgatcgttgaacccaggaaggatatcgagcagttcttcgatggtagccgcgttctggtggcctcgggatacccctcttcgctgtacaatcatgaatggtgtatcgattacgtttctgcccgggagggcttgaaactggctattttcctttatggttcaggagatgcacttcgtaatattgaggaacgcgccaattccgaacgtgtaaaaatattctggaactgcagtcaggctactttcaatcatgcgctttcgcgtgcttccgtctatctgcgtcctacctcgaaagacagtttcggtgtggcagtagcggacgcagtggaattgggtgtccccgtcgtcgcttcggacgtatgtaaacgttatccaggggctgggcttttcccggttgacgacttttcagccttctgtgaaacggttgactgcatattgaatgggacggacattcgcacggaagatagtgaggggttccgtgctttttcttattctgatttggatttgagggacgtatgaagcaggttctccaggatatggccaagggtgggacgctggtaactgaggcgcctgcgcctcaagcgtccaaggaacatatcgtcatcaacagcagggtctctcttatttcggctggcaccgagcggatgctcgtcggatttggcaaggcctcctatctggaaaaggcccgccagcaacccgagaaagtcaagatggttctggagaaggtccagaccgatggcctgatgactactatcgaggctgttcgttcgaagcttgggcagcccctgcccctgggttactgcaatgtaggcgtcgtttccgaggtcggttccggagtggaaggtttcaaggtcggagaccgggtcgtatccaacggacctcatgccgatgtcgtaaaggtgtcgaagaatctttgcgcgcgcattcccgacgaagtcgatgatgagtcggcggcattcgtcgtcgtcgccagcataggcctgcaaggcattcgccttgctcagccgacactgggcgaggcgtttgtagttacgggtgtcggcctgatcggtttgctcacggtgcagttgctgcgtgctcatggttgccgtgtccttgccatcgattatgacgagaacaagctttccttggcccggggatatggagccgcgacctgcaaccccggtcggggagaagaccctgttacggccgccatggcgttcagtcgtgggcaaggggtcgacggtgtgatcatcaccgcttccacgcaatcatcggatcctgtaacccatgccgcacgaatgagtcgcaagcgtggccgtatagtcttggtcggtgtcaccgggctagagctgaacagggcggatttctatgaaaaggaacttacgttccaggtttcctggtcttatggccctggtcgttacgatcctaactacgaggagaaagggcaggattatccgctcggattcgtgcgctggacggaacagcgtaatttcgaagccatattggatatgctcgcctgcgggcaactggatgttcaggccctgattacccatcgcttcgctttcgaagacgctccgcaagcgtaccaggctctggttgacgacaaggagaaggccggtcttggaatcctgttgcagtacacggcggatgcggccagccgtgcgatcaggcaactcgaacttagacagggggttaccttcgatccggttcgtccggtgctcggtttcatcggagctgggaactatgcgtcacgcatgctgattcccgccttcaaggcagctggggcgcagtttcataccattgctaccgccggcgggatcaatggcgtcattcatgggcagaaggccggttttgccgaagcatcgaccgacgtcgatgcgatgctggccaacccgacgatcaatactgtcgctgtcgttacccgtcacgacagtcatgctcgtttcgtttcccaggttcttcgggccggcaagagtgtcttcgtggaaaagccgctagcaatccatgcaggcgagttgcaagaggtcagagacgcctatcaggcagccaactccaatggcgcttctgcacagctcatggttgggttcaaccgccggttctcgccgcaggtgcagaagatgaagtcgttgctggctgctgttaaagaacccaagtccttcatcatgacgatgaatgccggggctattccggccaatcattggacccaggacaaagcggttggcggtggtcgcatcatcggcgaagcgtgccacttcatcgatctgatgcgcttcctggccggcagccggatcgtttccgtgcaggctcgcagcatgggcgatggcgcaggcgtcgaggtgacggaggacaaggcatccataaccctggggttcgaggatggctcctttggcactattctgtacttggccaatggcgcggccagtttccctaaggagcgggtcgaagtattcacggctggacgagtgctgcagttggataacttccgcaagttcaagggatatggctggccaggcttttccaagctcaatttgtggaaacaggacaaagggcagaatgcctgtgccaaggcatttctcgacggactccagagcggacagcaggcgatacccgccgaggagatcttcgaggtggcggacgttaccatccaggtcgcagagttgctgcgtaaccaatgagttcgttcatggtaaaggccaggacggcgtgggcgctcggtgcccccaatctgctgcgggtgttggcttatcgcatgggggtgatgacagggctcaatcccgtccggcgtttgcaggagagagcgccgtccggtgatttcttcctgccgacgccgccccgtccctcggtagtttcctggctcgacaagacgccctggctgggtcgttacttcggctacgtgccttatgccgctgattccgttcccgattggcacagtaatctgctgactggagtgggaatgaccaattctgatcggaattggtgggagatccccgatttcgatctggcagtgggagacatcaaggctgtctgggaggcgtcgcgtttcgactgggtgcctgctttggcgcaaaaagctctggctggtgagagtggtgcgctggacaaactgaatgcctggttgaacgactggtgcatgaataatcctccttacaaagggccgaattggaaatgcggccaggaggcttcgatcagagtcatgcacctggccctggcggccattctgctgcagcaggtgacagctccgcctgccgcactgctcgacttgctgcgcatccatcttcgaaggatcgtgccaaccattcgctatgcgatagctcaggacaacaatcacggtacctccgaggccgcagcgttgttcattggtggcagttggcttcgggctcacggcgagcctaacgccgttacctggatgcgattagggagaaaatggctggaaaaccgggcgaaacatctgattggcgaggacggtagcttcagccagtattcgctgaattaccaccgggtcatgctcgatacgttctcacttgccgagctgtggaggcgtcagctttcccttgtggaattctctgctcgctggtattcgcgggcaagtgcagcgactcactggctgcacgcattcattgaccctgccactggtgacggtccgaaccttggggctaacgatggtgcacgactgctacctctgacccagaccgattatcgtgactatcgacctgcggtgcagttggccatggcattgttcaccgataccaacgcctatcccggcaatcaagagtgcagccgaccgctgctgtggctggggctcgatctgccttctgccgagtctcctgtaccccggagccgagtgttcgacgagggtggctacgccattctgcggagcgggcaggcaatggcaatgctgcgttaccccaggttccgttttcgccccagccaggcggatgctcttcatcttgatctttggctcgaagggcgaaatctgctgcgcgatgccggcacctacagctacaacaccgaatccgcttggctgagttacttccccggaacggccagtcacaacacgatccagttcgatggtcgcgatcagatgccccgtctcagccgttttctttttggcgactggttgaaggcgacgcaggctgtgccgctgacttcggagcgagcgtcggaggaaatgaatgcattttcggcggcctataccgatgggtatggcgccaggcataagcgggaggttgccttgtttccggatggactcaaggttatcgatgagatttccggcttttccgcgagtgccgtgctgcgctggaggctggagcctggaagctgggtgttggatggaaacacgctcaagggagagaggggagacgtgctgattttcgaaagctcgatgcctattctgcgtatcgagctgacaatcgggtgggagtcgcgctactaccttgcgaaagaggaggttcctgtcatcgagatagaggttgggcaggcgggaacattgaagacggattacaggtgggcccgatgagagtgatctattttcatcaacacttttcgactccgaaagggatggtaggcatccgctcctacgagatggctcgccgcctggttgcccgaggacaccaggtcacaatggtgtgcggcagctatggcggagggcagactggtttggatgtgccctttagtaaagggagaagacagggcacggtggatggaatagacatcatcgagttcgatctggcgtattccaacactgatggtttcatcaagcgcactactacttttttcagttttgcccttcgtagcataagactggcgatgacggaggagtacgatctcgttttcgctacgactactcctctgactgccggcattccggggatctttgctcgttggctgcgtggcaaggcattcgtgttcgaagtccgcgatctctggccggaattgccgaaagccatgggtgtgatcaccaacccggtggtgctgggaatgatgtctgtcctagagtggctgagctatcgttccgcgcaccggctgatcggtttgtcgcctgggatcgtcgaaggtatcgagcgtttaggtgtgccggcgcacctagtggaaatggtgcccaacggctgcgatctggatatttttgcctccgactccgagccgtggcgtccagagcgggtcaaggcagacgacttgctcgcggtattcgctggaacccacggcgtggcgaacggtctggatgcggtgttgaacgcagctgcggagctgaagaagagaggccgggatgatatcaagttgcttttggttgggcaggggaagctcaagccggttctgcagcagcgtgccttccgtaaagggctggataatgtggtttttcacgagcccgtgaacaaggcccgactggcagggctcatggcctcggcggacctgggattgcaggtgttggccaatgtgccggctttttactatggcacttcgccgaacaagttcttcgactatatagctgcaggattgccggtgctgaacaattatcctggttggttggcagggatgattgctgacaatcaatgcggctttgccgtcgagccggacagtccgactgctttcgccgatgcactggagcgcgctgcggacgatcgtgagtcgctgagagcaatgggggagcggggtagagccttggcggtccgagagttcgagagacacaagcttgcggaccggttcgtcgattggttggaaggggcgaagtcttgatcaagcgcctcttcgatatcgttgcttctttactggggttgttactgctatctccggtcattctgttcgtcgcctggcagatacgccggaaactcggcaagcctgtgcttttccgccaggtacgacccggcgtcggcggacatcctttcgaaatgatcaagttccgcacgatgcgcgatgccgtggatgcgaacggaaacgcattgcccgatgtcgagcgtatgaccccctttggcaactttttacgttccaccagcctcgatgagttgccggagttatggaatgttctgaagggagacatgagtctggttgggcctcgtcccctcttgatggagtatcttccgttgtattccgtcgaacagtaccgaaggcatgaactaaggcccggtgttaccggctgggctcaggtaaatggacggaatgcgctgagctgggaggagaagttcgagctggatgtctggtatgtcgataatcgttcgttctggctggatcttaaaatcattctcatgaccttgaagaaggtgtttgtccgcgaaggaatcagtgcggatggagaggcgacgatgtctaaattcaccgggagcgagaagtcatgagaaagctggctattctcggcgctggcgggcatgggaaggtcgttgccgatacggcggaatgctgtggctgggaagaagtgtttttcttcgacgatgcctggccgggaaagagtgccaatggcagatgggagattgtcggtggtttcgatgatttgatggcccgtcttcccgagttcggtggcgttgttgtggctatcggcaacaacgtcactcgccatgcaaagctcgaggcgttgaaggtggccggagctggactcatcgtgctttgccaccctcaggcaagtattagccgctatgcgtcgctggggctgggcacagtggtgttcgctggtgtggtggtgaatgtcgatgcccgtatcggagagggtgtcattctcaataccggttgcagtatcgatcatgattgcgtgctcggagctgccgtgcacgtcagcccgggggcccgaatcgcgggtggtgtggagatagcggagaaggcctggattggtatgggggcctgtatccgtcaattgacacgtatcggggctgggtcaatagtgggggccggcgcagtggtgctggaggaagtccccgagtcggttaccgttgtcggcgttcctgcaaagattctgcatatgggacagcacctctgagcgtttgctgccctttcaaacaattctgatgagtgagtgctgtgctgaatacacctttttctccgtggccatcattttccgaagaggaggccaatgccgttcgagatgttgtcctgtccaacagggtcaattactggaccggccaggagtgccgcgagtttgaaaaagaatttgcgacctgggccgactccaggttcgctgtcgctctcgctaatggaaccgttgccttggatgtagcactgaaggcccttgggatcggagttggcgatgaggtggtggtgacctcgcggacattcttggcctctgcttcttccatcgtcaatatcggggccgttccagtattcgccgatgtcgacctggatacccagaacgtgaccgttgattccatccgtgctgtcctgaccgagcgcaccaaggcgatcatctgtgttcacctggcaggatggccgtgcgacatggacccgatcatggcgttggccgaggagcatgggctgaaggtggtcgaggattgtgcccaggcgcatggagctcgttataaagggcgttcggttggctccattggacacattagtgcttggtcgttctgccaggacaagataatgaccacgggaggagagggcggtatggtcactaccgacgaccgcgaactctggtcccgcatgtggtcgtacaaggatcacggaaagagttgggaggcggtctacgagcgggagcacgcgccgggtttccgttggctgcatgaaagtttcggtacgaatttccggatgatggaggtccaggctgtcatcggtcgtatccagctacgccggatgggcgactggcatgtccgccggcttgcgaatgcgcagcgcatctgggagaaagcccggaatctacctgggttacgagtaccgatcattcctgaaggtatcgaacacgctgcttataagtgctacgtattcgtggatccgccgcgtttggctgaggggtggacgcgtgatcgtatactgtccgaaatcgtcgcccgcggtgtgccgtgcttttctggctcatgctccgagatttatcttgaaaaggcgttcgattcgacggggtggcggccggaagtacgcttgcccaacgcggtgacgctgggtgaggacagcctcatgttcttggtccatccaaccttgagcgagagcgagattcagagaacactcgatgtgctggaggcagtcatgctggaggcctgccgggattctcaggtcgcgggggcgagtatcgggtaatcaccgatgcagccgggagtggggcacattcagccttgctccgcctgtcttgctgcggaggatgtcttctcctgaggcattccggttcaaaaacgaatgcctcgacgggaaggcgtagaaaggaaactctacatgggttgaaaaattgcttccgtcgttcactcttcgggagtcgtcttgagataataataaatgggcactctgcttctcctctcttcgctggtcttctcttttgtcgtaacagccgcactccggcgctatgccctggccgagaagcttctggatgttcccaactttcgtagttcgcatagctgcccgaccccgcggggcgggggaatggctttcgtcgttagtttcctgtcgagcttgctctacctgacattcaccggcttgatcggtacggaaactttctacgcgctgttcggtggcggcgctggcgtggcgttgctgggctggcttgacgaccatggttacagcatcaccgtcgggcttaggctgttgggacatttctccgcggctttatgggtgcttttctggctcggaggcatgccgccagtccccgtattcggccacaccgtcgatctgggggtattcggcaacctgccggctttgctttatctggcctggttgttgaacctgtataacttcatggacggtattgatggcctcgccagtgtcgaggcgatctgtgtatgcctggggggaatactgctgctgtggacgctagcggccagtggcctggggcctcattatggcgagggcgtatggctactggccttgcttgcctgcaccgtattgggttttctcatctggaatttcccacccgcccgcattttcatgggggattccggcagcggtttcctgggcatcgtcctcgggacgatttctttgcagatggcctggttttccccctctctgttctggtgttggctgatcctgctcggggtattcgtggtcgacgcaacctttacgttgctgcgtcgtctgctacgaggcgataaaattcaccagagtcatcgcagccatgcctaccagcacgcagcccgcatgctgtcgcggcatttgccggttacccttggagtggttgcgatcaatctcttctggttattgcccctggcattactggtagtgctgggcattatcgatggggtcttgggaatgcttatcgcgtatgctcccctgatttggttggtagtcaggctcggggctgggaagccctgagcattgggctgctgcccttgcaatgttgctgctatggtttgtctaccgatacgacggatcggtatggatgtattgaacggggctgataaataggatgttggataatttgaggatgaagctcctgggattgccgcgtcgctacaagcgaatgctgcaagtcgccgccgatgtgagccttgtttggctatcgctctggctagccttcctagtcaggctgggcacggaagacatgatcagccccttcggcggccatgcctggctgttcatcgccgccccgttggtggccattcccctgttcatccgcttcggcatgtaccgggcggtgatgcgctacctgggcaacgacgcccttatcgcgatcgccaaggccgtcaccatttccgcgctggtcctgtcgttgctggtctactggtaccgctccccgccggcggtggtgccccgttccctggtgttcaactactggtggttgagcatgctgctgatcggcggcttgcgtctggccatgcgccagtatttcatgggcgactggtactctgctgtgcagtcggtaccatttctcaatcgccaggatggcctgcccagggtggccatctatggcgcgggggcggccggcaaccagttggttgcggcattgcgtctcggtcgggcgatgcgtccggtggcgttcatcgatgacgacaagcagatcgccaaccgggtcattgccggtctgcgggtctataccgccaagcatatccgccagatgatcgacgagacgggcgcgcaggaggttctcctggcgattccttccgccactcgggcccggcgccgagagattctcgagtccctggagccgttcccgctgcacgtgcgcagcatgcccggcttcatggacctggccagcggccgggtcaaggtggatgacctgcaggaggtggacatcgctgacctgctggggcgcgacagcgtcgcaccgcgcaaggagctgctggaacggtgcatccgcggtcaggtggtgatggtgaccggggcgggcggttctatcggttcggaactctgtcggcagatcatgagttgttcgcctagcgtgctgatcctgttcgagcacagcgaatacaacctctacagcatccatcaggaactggagcgtcggatcaagcgcgagtcgctttcggtgaacctgttgccgatcctcggttcggtgcgcaatcccgagcgcctggtggacgtgatgcgtacctggaaggtcaataccgtctaccatgcggcggcctacaagcatgtgccgatcgtcgagcacaacatcgccgaaggcgttctcaacaacgtgataggcaccttgcatgcggtgcaggccgcggtgcaggtcggcgtgcagaacttcgtgctgatttccaccgacaaggcggtgcggccgaccaatgtgatgggcagcaccaagcgcctggcggagatggtccttcaggcgctcagcaacgaatcggcgccggtgctgttcggcgaccggaaggacgtgcatcacgtcaacaagacccgtttcaccatggtccgcttcggcaacgtcctcggttcgtccggttcggtcattccgctgttccgcgagcagatcaagcgcggcggcccggtgacggtcacccacccgagcatcacccgttacttcatgaccattcccgaggcggcgcagttggtcatccaggccggttcgatggggcagggcggagatgtattcgtgctggacatggggccgccggtgaagatcctggagctcgccgagaagatgatccacctgtccggcctgagcgtgcgttccgagcgttcgccccatggtgacatcgccatcgagttcagtggcctgcgtcctggcgagaagctctacgaagagctgctgatcggtgacaacgtgaatcccaccgaccatccgatgatcatgcgggccaacgaggaacacctgagctgggaggccttcaaggtcgtgctggagcagttgctggccgccgtcgagaaggacgactactcgcgggttcgccagttgctgcgggaaaccgtcagcggctatgcgcctgacggtgaaatcgtcgactggatctatcgccagaggcggcgagaaccctgagtcatcgttctccggaaaaggccgcctagcggccttttttgttttctccgtacgatgtttccggtgccggaccaggaagcgactgctttgctggggctgtcgatccaggtgcgttccacggcgataaggtggtttcgtggatgggcatgaagccctctacgtggtcattcatctctgaaggagtgcacccatgcacctaatcaaatccgctctgcttctcatcctgttcgcctgtcttccgttttcggcttccgccgcaccggtcgccgtcgccaagaatccgctggccgcaacgacacctgcgacgaccgtgtcgccgggggagcaggtcaatatcaatacggtcgacgaggccgccctgatacgggggctcaacggtgtcggcgaggccaaggccagggcgatcctcgagtatcgtgcggcccatggtccgttcgtctcggtggatcaactgctggaagtgaaaggggtaggcccggcgttgctggagaagaaccgggcgcggatcgtcatcgagtgaggtgcgactgaaggggcgaactttcgtcccgataacgaaaaagcccccggcatgtgccgagggctttgaatttggctccgcgacctggactcgaaccagggacccaatgattaacagtcatttgctctaccgactgagctatcgcggaacagcgaggcgtatgttactgattaaaaaggggaagtcaagcctctcccgatgacttccccattttccctacaggacctggacgatggccttggtgatggtctccaggttcgatttgttcagcgcggcgacgcagatacggccggtgctgacggcgtagatactgaactcggtcttcaggcgctcgacctggtcggcggtcaggccggaataggagaacatgccacgttggcgaccgacgaagctgaagtcgcgcttggcgccgtgggctgccagttgctcgaccatcgccaggcgcatgtcgcggatgcggtcgcgcatctcgcccagttcctgctcccagagggcccgcagttccgggctgttgagcacggaggagacgacgctggcgccgtgggtcggtgggttcgaatagttggtgcggatcactcgcttcacctgggacagcacgcgggccgattcatcgcggctttcggttacgatcgagagggcgccgacgcgttcgccatagagcgagaaggatttggagaacgagctggaaacgaagaagctcaggcccgactgggcgaacaggcgcaccgcggcggcgtcttcctcgatgccgttgccgaagccctggtaggcgatgtcgaggaacggcacgtggcccttggccttgagcacgtccagcacctgtttccagtcgtccagctcgagatcgacgccggtcggattatggcagcaggcgtgcagaaccacgatcgagcgggccggcagggcattcaggtcttccagcaggccggcgcggttcacgccattgctggcggcgtcgtaatagcggtagttctgcaccgggaagccggcggcttcgaacagtgcgcggtggttttcccagctcgggtcgctgatggccacggtggcgtcgggcagcaggcgcttgaggaagtcggcgccgagcttgagcgcgccggtgccgccgacggcctgggtcgtgaccacacggccggcggccagcagctcggactcgttaccgaacagcagtttctgtacgccctggtcgtaggcggcgatcccttcgatcggcaggtagccgcgcggcgcgtgggcctcgatgcgggccttctcggcagcctgcacggcacgcaacagcggaatgcgcccctcctcgttgtagtacacgcccacgcccaggttgatcttgcccggacgggtatcggcgttgaaggcttcgttcaggccaaggatgggatcacgcggtgccatttcgacggcagaaaacagactcattttgcggctgctcggagtgtgaagagaggagggcaacgcaacccgttatgcgggggcgcaaagggttgcgcaaacggggggttattatagacaccccttgatgcatgcggcgacatttaggtgcatgctttcagctatttctgacgccggattttccttggcgtcacagctccctgcgaggtttttcatggatacgttccaactcgactcgcgcttcaagcccgccggcgaccaaccggaagccatccggcagatggtcgaggggctggaggcggggctttcgcaccagaccctgctgggggtgacgggctctggcaagactttcagcatcgccaacgtgattgcccaggtgcagcgcccgaccctggtcctggcgccgaacaagaccctggcggcccagctctacggggagttcaagacgttcttcccgcacaattccgtggagtacttcgtttcctactacgactactaccagccggaggcctacgtcccgtcttccgatacctatatcgagaaggactcctcgatcaacgaccatatcgagcagatgcgcctgtcggcgaccaaggcgctgctcgagcgtccggatgcgatcatcgtcgccaccgtgtcgtccatctacggcctcggtgatcccgcgtcctacctgaagatggtcctgcacctggaccgcggcgaccgcatcgaccagcgcgaactgctgcggcggctgaccagcctgcagtacacccgcaacgacatggatttcgcccgtgcgactttccgtgtgcgtggcgatgtgatcgacatcttcccggccgaatccgatctcgaggcgattcgtgtcgagttgttcgacgacgaggtggaaagcctctcggccttcgatccgctcaccggcgaggtgatccgcaagctgccgcgcttcaccttctaccccaagagccactacgtgaccccgcgcgagacgctgctggaggcggtcgaccagatcaaggccgaactcaaggaacgcctggactacctgcgcaacaacaacaagctggtggaagcgcagcgcctggagcagcgcacccgtttcgacctggagatgatcctcgagctgggctactgcaacggcatcgagaactactcgcgctatctttccgggcgggcccccggcgagccgccgccgacgctctacgactacctgccggccaactcgctgctggttatcgacgaatcgcacgtcagcgttccgcaggtcggtgcgatgttcaagggcgaccgctcgcgcaaggagaccctggtggaatacggtttccgcctgccttcggcgctggacaaccggccgctgcgcttcgaagagtgggaggcggtgagtccgcagaccatcttcgtctccgccaccccgggcccctacgaggcggagcatgccgggcgggtcatcgagcaggtggtgcgtcccaccgggctggtcgatccggagatcgaggtacgtccggcgatgacccaggtggacgacctgctctcgcagatccgccagcgtgtggccaaggacgagcgggtgctggtgactaccctgaccaagcgcatggccgaggacctcaccgattatctcggcgatcacgacgtgcgggtgcgctacttgcactcggacatcgataccgtcgagcgagtggagatcatccgcgacctgcgcgccggtgcgttcgacgtgctggtggggatcaacctgctgcgcgaaggcctggacatgcccgaggtgtcgctggtggcgatcctcgacgcggacaaggaaggcttcctgcgctcggagcgctcgctgatccagaccatcggtcgtgccgcgcgcaacctgcacggcaaggcgatcctctacgccgacaacgtcaccggctcgatgcagcgtgcgatcgacgagaccgagcggcgtcgggccaagcagatcgctttcaacgaagcccatggcatcgtgcccaagggggtgcgcaaggacatcaaggacattctcgaaggcgccgtggtgcccggcgcgcgcggcaagcgcaagggcgtggccaaggtggcggaggagagcgggcgctacgagaacgaactgcgctcgccgagcgagatcagcaagcgcatccgccaactggaggaaaagatgtaccagttggcccgcgacctggagttcgaggcggcggcgcaactgcgcgacgagatccagacgctgcgcgagcgcctggtcaacgtctgaacctcagtgagccccggcgtcggcgcgggcgccgatgccggccggcagcgagcgggtcagcagcaccgcgagcatgctcactgcgagcaccatgccgatgacatggaaagcatcgttgtaggccatgatcatcgcctgctggtgggtgatctcgctgagtttgcccagcgccgcctgctggctgcccagttgcgcggcgagttgcgcgaggcgttcgtcgacctgcgggttggtcggcaccagggcttcgcgcagatagtcgaagtacaccttggcgcgactgtcgagcagggtcgcgagcagggcgatgccgatggcgccgccgaggttgcgcaggatgttgaacaggctcgaggccgagccggcatcctgtggctgcaggtaggcggtggcgatcagcgaaatggtcaccatgatcatcggctggccgagggcgcgcagtagctggatctggttgaactgcggtccggcgaagtccgggttgagcaccccggagaagaagctggcaaggccgaacaggccgaagccggcggcgcagagcaggcgcggcgagaccagcttcatcaacttcgggaccagcgggatcaggaacagctggggaatgcccatccacatgatcacctcgccgatctgcatggcgttgtagccctggatttgtgccaggtacagcggcagtacgtagatcgagccgtacaggcccatgcccagaccgatgctggaaatgctcgcgaggccgaagttgcggttgcgcaggatgcccaggtcgatcagcgggtttggccgcgacagttgcaggatgacgaacaggaccaggctgaacagggcgacgctgccgaggctgacgatcagttgcgactccagccagtccttgcggtgaccttcctcgaggaaaacctgcaggcagcccaggccgatgccgagggtgacgatgccggcgtagtcggtactcttcagcagttcccaatgcggcgcctttttctccaggccgtagagcagcccggcgatcatcaacaggcccggcggcacgttgatatagaagatgtattcccagccgaagttttccgtcagccagcctcccagggtcggtccgatggagggcgcgaaggtggcggtgatggcgaacagcgccatgcccttcggacggtggtgttccggcaacttgaccagggccagggtgaacgccagcggaatcagagcgccgccggtgaagccctgcatggcgcggaacacgatcatgctttccaggttccaggcgaacgagcagagcagcgaggacaccaggaagcccaccgagatcatcaccgccaggcggcgtgccgagagcagttgcaccagccaggcggtcatcgggatcatgatgatctccgccaccaggtaggaggtggagatccacgagccttcctcgagggttgccgccagcgcgccctggatgtccttcagcgaggagttggtgatctggatgtcgagcaccgccatgaatgcgccgagcatggcgctgagcaccgcgatccagtcgcgccgggtcggttcgccaagcggccgggccagcgcctcagcggtcacggagctcgacctcggcttcgacggacatgccggggcggatgcggccatgcagcgggttgtcggcctcgaacacgatcttcaccgggatgcgttgcaccaccttggtgaagtttccggtggcgttgtccggtggcagcaggctgaactgcgcgccggaagcggcgaacaggctatcgatgcggccgtcgataggcgtgtcggggaaggcgtcgaaggtcaggcgcgccttctgcccgtcgcgcatgcggcctacctgggtctccttgaagttggcctggacccagatgtcttcgtccggcaccagcgacagcaaatgggtgccgacctgcacgtactggccgttgcgtgcgctgcgctggccgaccaggccgctgatcggcgaatggatcagggtgcgtgacaggttgatttcggcttgcgccagttcggtgcgggcgctggcgatctgcgcttccaggcgcttgatctcggcgcccagggtgtcgcgctggacgcgttgtgcctcgaggtcggcgcgggccttggccagttgcgagcgagccacatggttgtcggcggtgagggtggtgacccgttcctcggaaacgtagccgggcttgcgcagggcttcggcgcggttcaggtcgatctgtgcgcgaccgagggttgcctggctggcgttgacgtcggcggcgctggcggcgatcaggctgccctgctgcaccagcttgctgcgcgcctgggccagttccgcctcgcgggtggccagcgcggcctgggcgcgctcgacggcgagcttgaagtcggcgtcttccaggcgtaccagtagctgccccttgtccacgtgctggttgtcgcgcaccaggacttcctcgacccgcgcgcccaactggctggccacccgcgtgatctcgccctggacgtaggcgttgtcggtgctttccacgtggcggccgatgaaccaccagtgcaggaagaaggccagggcgatcaggccgacggccaccaggaagacggtcaggcgacgtttgagttgggcgggcatgggtggagtgttccgtcggcaaaattcggccaatctagcagtgttccgccggacgttataggcgctacacttcggactctttgttgcttatagggaacaataatggggcttgatgatgcgctgatcttcacccgcgtggtggagtaccacagcttcacccaggccgcacagagcctgggcatgcagaagtccacggtgagccggcgcatcgccctgctggaggagcgcctgggcgtgcgcctgctcaatcgcactacccgcaagttgcgcctgaccgaagtagggcaggcctactacgagcgctgccggcagatcatgcacgatttcgccgaggccgagcaggcggtcatgcagttgcaacaggcgccgtcgggattgctgcggatcacctcgccgatagagttcggccagatgttcctcgccagcctgctgggcgacttcatgcgccagtacccgcagatcaccgccgaggtcgagctggcctcgcgcagcgtcgatccgctgcaggagggcgtcgacatcgtgatcatggtcggccagccggaggattccaccctggtggcccgtcgcctgctctctaccagccgctggctctgcgccagccccgactacctggcggcgcacggcacgccgacatcggtggccgagcttgccgggcatcgcgcggtccttctgtccaccgactcccagcgctactggccgctttccggagacagcctgccctgccagcgggtgctgtcctgcaacaacatcaccttcgcccgcgaggcggtggtcgccggtgccggcattgccgcgctaccggcgctgatctgtgcggagagcgtgcacagcgggcgtctggtgcgtttgctggcggacgtgccgttgccggtcggcgaactgtatgcggtctatccttcgcggcgtttccaggcgatgaaggtcaaggccttcctcgatttcctgatcagccgcctgccggccgacaccggtcgtttactggagccggaggcggcccgcctgataacatcgcgcccctgaatttccgttttaacttccgcttggcaagagagtctccatgaccactgttcgtactcgcatcgccccgtcgccgacgggcgacccgcacgtcggtaccgcatacatcgcgctgttcaacctgtgcttcgcgcgtcagcacggcggtcagttcatcctgcgcatcgaggacaccgaccagctgcgttcgacgcgggagtccgagcagcagatctacgacgccctgcgctggctcggcatcgaatgggacgagggcccggacgtcggcggcccgcatggcccgtaccggcagagcgagcgcgggcatatctacaagaggtattcggacgaactggtcgagaagggccatgccttcacctgcttctgcacgcccgagcgcctcgatgcggttcgcgccgagcagatggcgcgcaaggaaaccccgcgctacgacggccactgcatgcacctgccgaaggatgaggtgcagcgccgcctcgccgccggcgagtcccacgtcacccgcatgaaggtgccgaccgagggcgtctgcgtggtgccggacatgctccgcggcgatgtcgagattccgtgggatcgcatggacatgcaggtgctgatgaaggccgacggcctgcccacctacttcctcgccaacgtggtcgacgaccacctgatgggcatcacccacgtcctgcgcggcgaagagtggctgccgtcggcgcccaagctgatcaagctctacgagtatttcggctgggagcagccgcagctgtgctacatgccactgctgcgcaacccggacaagagcaagctgtccaagcgcaagaatccgacctctatcaccttctacgagcgcatgggctacctgccgcaggcgctgctcaactacctcgggcggatgggctggtcgatgccggacgagcgcgagaaattcaccctcgccgagatgatcgagcatttcgacctgtcgcgcgtctccctgggcggaccgatcttcgacctggagaagctctcctggctgaacgggcagtggatccgcgagcagtccgtggaggagttcgcccgtgaggtgcagaagtgggcgttgaatcccgaatacctgatgaagatcgctccgcacgtgcagggacgggtggagaacttcagccagatcgcgccgctggccggattcttcttcagcggcggggtgccgctggacgcttcgctgttcgaacacaagaagctcgatccgacccaggtccgccaggtcctgcaactggtgctgtggaaactcgaatccctgcgccagtgggagaaggaacgcatcaccggctgcatccaggctgtcgccgagcacctccagctcaagctgcgcgacgtgatgccgctgatgttcccggccatcaccgggcatgccagctcggtttcggtgctggacgccatggagatccttggcgccgacctgtcgcgttatcgcttgcgccaggccctggagctgctgggcggggcgtcgaaaaaggaaaccaaggagtgggagaagatccgcgacgccattcccggctgaccggctttctcccacagtcgatgacgaggcctgcccagttgcgggcctcgtttttgggggaggggaggtaagtgattgttcttccggtaaaattttttaggtttcgatgaaaaataatgttgacagcctcaagcctcgcccttagtatgcgccccgtcttcacgacgaactcaacgaagtgaagcgatccagcggtactttggggctatagctcagctgggagagcgcttgcatggcatgcaagaggtcgacggttcgatcccgtctagctccaccaaattgccgggaatacgcggttggttttgcggattcctacgaaggtttcgtccccttcgtctagtggcctaggacaccgccctttcacggcggtaacaggggttcgagtcccctaggggacgccacttcatgttcatccgtcccagcaatggatgaacgtgtcgacgaccggaaggttgtcgaagcgatcggaagatcgcccgcctgatggcgaattcggggctatagctcagctgggagagcgcttgcatggcatgcaagaggtcgacggttcgatcccgtctagctccaccacattccaaggccagcatcgctggccttacttttcgaaggtttcattgtccccttcgtctagtggcctaggacaccgccctttcacggcggtaacaggggttcgagtcccctaggggacgccactttttcccgctctgcggggctctatagggccattccgaattggaatggcccttttgttttttcccttttcgaatttcctgacagacggcccggccgtacgcttgccgatttttattatgcatataatatttcatccataatattttcggagatcgtcatgagcgacaagaaaacccagacccgtgcccgcatcctcggtgccgccacccaggccctgctcgagcggggcgccgtcgaacctagcgtcggggaagtgatgggcgcggcggggctcaccgtcggcggcttctatgcccacttccagagcaaggatgcgctgatgctcgaggcgttcgagcaattgctcggcaagcgccgcgaactgctcggcgaactcgatcccggattgtcgggaaaggagcgtcgtgccttggcggccgccttctacctgtcgcgcaagcatcgggacgcacaggtcgacgccggttgtccgctgccggcgaccctagccgaggtggcgcgcctgccggaggggtttcgcgaggtcttgagcagacatgtcgagatcatggtcgccagcctggcggaaagtcccgaggaaaccgacgtcgccctggccgacctggtgttgatgattggcggtttggcgctggctcgggcattggggccgggggagctgtccgaccgggttctgcgtgccgccaagcaggcggtgaactgaggaggtgcgagatgagcagcctgacctggattcgcggtttcaacgggacgatcggccgcatcgcgccgcgttggacggccgagcgtatgcgtcggacgttcatggtgcctggcgagtggccgccgaaggattgggagctgccgctgctggccagttcggagcgcgtcactctgcgcttcgggctgtcggtgttgcgctggggcgaggggccggcagtcctgctgctgcatggctgggccggcaggccgacacagttcgcccatctgatcgagcaactggtcggcgcgggttattcggtgtatgccctcgatgcgccggcccatggccgctcgccgggcagggaggcgaacgtggtgctgttcgcccatgccttgctggaggccgctggcgagttgccgccgctgcgtgcggtggtcggtcattccctgggtggcgcggcggcgttgctggcggcccagatggggctgcgcagcgaagcgctggtgacggtctcggcgccgtcgcggattctcgaacagttgcgcctgttcgctcgtttcgtcggtttgccggccctggctcgctcgcatttcatccgcctggtcgagcgtcaggctggcatatccgcggcgtgcctggatgtggcgcgctaccgtctggaaatgcccgggctggtggtgcatgccgacgacgacacgcgcgtagcggtggaaaatgccgagcgcatccatgccgcctggccggccagtcgcttgctgcgtctgccgggcggcggccaccaccgactgctcggcgagcgcaggctgagcgagtcgctgctggcgctgctcgaggagcgcccggcgatgcgcgcttgccggcgcgtggaaaagacggcgagcgcttcctgaggcgcgtagcagaggggttgtcgttgtcctgacctcggttcttcggtaaaaagcgctgtggcccgcgcggagcgatccggcggggcgaaccgtttcgaatcgaggagtgcccatgacattgccgctggatcgggtcctgcagcaggccagcccggtattgccggtgctggtgatcgaggacgtggcgctggcgcccgacctggcgcgcgcgttgtatgcgggcggcgtcacggtgctggaagtgacgctgcgcacgccgcaggcgctggacgcgatcgccgccatccatcgcgaggtgcccgaggtcctgctgggggcgggtaccctgatccacaccgagcagtttctcgaggcgcgcgacgcaggcgcacagttcgccgtcagccccggatgcacgccgcgtcttgccgccgccgcggaggatgccggcttgccatacctacccggggtgatgacgccttcggaagtgttgctggcgctggagtacggttatcgctcgctgaagctgttcccggccgatggcactgccagcgtgaaaatgctgaaaagcctgaaggggccgttcaccggcatccgcttctgcccgaccggcggggtgaacctggacaacctgctgaatttcctccgcctgcccaatgtcgcctgtgtcggcggcacctggttggcgccgccgagcctgatccgggcgcgggcctgggatcagatcacacaactggccagggaagcgcgcgaactggccggcagcctggagcagcattgatgaattgggactacgccgatccgttcgtgatcgacctcagggtcctcgccgaggacatcgacgggctcggccacgcgaacaacgccgtctacgtcagttggctggagcgctgcgcctggcgccactcgcagcggctgggcctggacctggccgagtaccgccggctggaccgggcgatggcggtgctgcgccacgagatcgactacctggccgcggcctacgagggcgacgaactgcaattggcgacctggatcgtcgagtccgaccagcgcctgcggatgaaccggcgcttccagttggtacgcccggcggatggcgccacgctgctgcgggcgcagaccaccttcgtctgcatcgaactgtccagcggcaagccgaagcggatgccggcggagttcatcgacggctacggccaggctctgctcgccgggacctgacccgtcgcgcgtcggccggcaggcattcgcactttgttccgggcggcggattctctagaatccgccgcctgtcattttcgaggtagtggttcgtgcaaatcgccctggcgccgatggaaggtctggtggatgaaatcctccgcgacgtgctgacccgcgtcggcggcatcgattggtgcgtcaccgaattcatccgcatcaccgatcgcctgctgccggccacggctttccacaagctggcgccggagctgcgcgacggtagccggacccgtgccgggacgccgatgcgtgtgcagttgctcggctccgatcctgcgtgcctggcggataacgccgcgttcgcctgtgagctgggcgccccggtgatcgacctgaacttcggttgtccggccaagaccgtgaaccgctcgcgcggcggcgcggtattgctcaaggagccggagctgatgcacgacatcgtcgccgccgtgcgtcgcgcggtgccgagcgagattgcggtgacctcgaagatgcgtctgggctacgacagtcccgacggcgccctggattgtgcgcgggccctggccgacggcggctcggcccatgtagtggtgcatgcccggaccaaggtcgatggctacaggccgccggcgcactgggaatgggtggcgcgggtggccgaggcggtgcgcgtgccggtgttcgccaatggcgaagtgtggacgctcgacgactacctgcgttgtcgcgaggtcagcggggtggaggacatcatgctcggtcgcggcctggtctcgcgtcctggcctggctcggcagatcgccgcctggcgcgatggcggcgaaatccgcgagatgccctggagcgagctgttgccgctgctgcgcgacttctggctgcaggcccggcgcaagctcgccccgcgctatgccccgggccgtctcaagcagtggctgggcatgctcacccgcacctatcccgaagccgtcgagctgttcgcacggattcgccgggaaagcgattgcgaaaccatcgaccggctgttgcaggtgtcgttcagccaggcggcctagcttgcgtaccaggcctagcggccgccgctgacatcgatgaaggtgccggtgctgtagctggcttcgtccgacgccagccagagaatcgcccgcgcgacttcctccgccgtaccgccgcgtcctaacggtatgccgcccttcaggcgttcgatacggcctggctcgccgccgctggcgtggatctcggtatcgatcagtccgggccgcaccgcgttgacccggataccctccgccgccacttccctggccagaccgatggtcatgctgtcgatggcgcccttggcggcggcatagtcgatgtattcgttgggcgatcccagccgcgaggccatcgaggacacgttgacgatgctgccgccgcacccgccgtggcgggtcgacaggcgcttcaccgcctcgcgggcgcagaggaagctgccggtcacgttggtcgcgaataccctgtgcaggcgcgccgcgtcgatgttttccaggcgcgtctgcgcttccagcatgccggcgttgttgaccagcacgtcgaggcggccgaaacgttcgtcgatggaggcgaacagccgctcgacatcgccttcctcggctacgtcggccgccaccgccagggcttcgccgccctggcgctcgatgcgctggcgcagcgcttcggcggcctcgcggttgcgcagatagttgaggacgaccgcatagccgcgttcggcggcgagcagagcggtggcggcgccgatgccgcggctggctccggtgaccagcatgacgttgcgcatgatgatgctccccaggtcagtagcgagtgaaggtcaggtagtcggcgtcccagcccaggccctgccagaacaggttggacagcggcgcgtcaagggccgattgcgcgcggatcaggccggcgccgcgcgagcgcagggcctcctcggcgctgcccaccagttcccgggccaggccctggcggcgagcctgcggcaatacgtagagctctgcgatctctccgacccgtgcctgaccgtcctcgatctgccacaagtgggcgaggacgaaaccgcggggatgctgctgggcctccgccagccagagcaagcggttgcgcgaggcggccaggagcagtgcctggatcgcctgttggtcgccggcatccagggtttccccggcttcgcggacattggcttgccagagcgcggccaccgcggggacgtcgtcggcgctggccaggcgaacccggtgctgctctggcgtcgcatcgagctcctggccgacccgcagcaggttgccatcgggatcgatcagggcgaattcgcgcatgccccagggctggtcttccaggaccgtgatgcgtggaatcccctggctgcccaggccgagggccgtggcctggcgatgcagcgcctgggcgtcctccaggcgcaggtaggcagcgctgcaattggtcttcggttcgagcgcctcgaacagcgacaggtgcagctccagggcgccgcgctggaggatggcgtaggtcggatagcgagcgccaaggtggaagccgagggactggtagaaggcgctggcgctgtccagatcgcggcaggggaaggtcgggattgcgcgttccatggcgacggttctcgaaaggatgagtttcgatctgagcacgacgaacggtcgttctcaaggctcttgaaatacttccgacgatccctatctagttcgtgcgggatgccgaagacgggttccgcaccagagtacttgctgataattcaggagattcgcaatgagcaacgctttttccctcgccccgctgttccgtcattccgtaggcttcgatcgcttcaacgatctgttcgagtcggccctgcgcaatgaggccgggagtacctacccgccctacaacgtcgaaaagcacggtgacgacgagtatcgcattgtcatcgccgccgccggcttccaggaagaagacctggacctgcaggtcgagcgcggcgtgctgaccgtcagtggcggcaagcgcgagaagtccacggacaacgtgacctacctgcaccagggcatcgcccagcgcgccttcaagctgtcgttccgcctcgccgaccatatcgaggtcaaggcggcttcgctggccaacggcctgctgaacatcgacctggtccggctggttccggaagaagccaagccgaagcgtatcgccatcaatggccagcgcccggcactggacaaccagtaaccgtcagcggtgatcgaaaaaaggcgccttcgggcgccttttttcatttcgttacgctatcggcccggggctccgccggtaggccgtcgggcacctcgtccagcaggacgtcgaggtcgacggcggccgccatcgcccggttgccttcgtcgctggggtgcagatggtcgccggagtcgtagcgcgcggcgagccgcgacggctgcttcggatcgcgcaatgccgcgtcgaagtcgatcaccgcatcgaaggcgccggcatgacggatccactcgttaacctgcctgcgcagggcttccttggcgggatggtaataatcgctcaacggcgtgccgggcagtgcgccctcgaacggcgtgagggtcgcgccgacgacccggataccccggttgtgcgcccgttcgatcaattgccggtagccggcgaacagcgcttccagggtgggcggtgcggcattccgggcgaaagcggtaccgggccaggcaatgtcgttgatgccgagcatcaccaccatgctgcttgcgcctggctgggccagtacgtcgcggtccagacgtgccagcgcgctcgcgcccatgccgtcgctcagcagacgggcgccggaaatccccgcattgaccacggcgacgccatgcggggccaggcgttcggcgaggaagtccggccaacggctgttccggtcgaggctggcgctggctccgtcggtgatcgagtcgccgagcgtcaccagcgtccgcgttgccgtttcggtttcgaccaggatacctgtcaacagcaggcgcgcgctggtgctctggctgtccgccgcgtccagctgcaatgcgtggctttgggtctgctcgccggcgacgatccagcccgtctggcggccgtcccagtggaaggtttccatgggcgtggcggccggcaggtagagactcaccagcacctgcgagagcgcggccaccggcatcgccaccggatcgctgagtagcgtggcgccgggcgcgatggtcgccgtccggcgtccgccaaaggtcacgtcatgcaggctgccggtggcgaccgcggcgcgctcggaacccggtttggccagggtggcccggccgatccggatcgggcgccttccataggtatttgccaggacgatgcgcacgcgcgttcctcccaggctgattcgcgccagttgccgcaccgtctggtcgtgcagttcggccggcacgttgctgggaaacaggaagtcctcagcccagaccggctgcgggctggcctgccagctggcggtccaggaagcggccggcgcggcgcaggcgtacaacaggctcgtcgcgagcgcgaaggcccgggttgcgctggaggtcgcggcgggaagtctttcgatgggtcgtttcatgtcgttgaattcagtggttatcctgtagctgatgatgaattcaaagatttaaggggaataggccgtagcggggaacatcatttatgaagcgaaatcatcaggcagggcgccatggcccggcttgaagtcaaccgttccggcgaactggaggtgtttgcccgggtcgtcgagtcggggggcttttccgccgccgctcgacgttgcggcatgacgccctcggcagtcagcaagttgatcacccggctcgaacagcgcctgggaacccgcttgctgaaccgctccactcgacaattgcaactgacacccgagggatgcgcgttctacgagcgcggggtgcgtatcctggccgacctggaggaggccgagcggtgtgcgagcgaaaacgcggcgccgcgtgggcgcttgcgagtcaacgccaacgtgcctttcgggcatcacttcctgctgccgctgctgcccgagttcctcgcgcagcatcccgaggtgacgctggatatcgtgctgaccgatgaggtcgtcgacatcctcgagcagcgcaccgacgtggccgtgcgcgcggggccgctgaaaagctcgagcctggtggcgcgcaagctggggagcacgcgcatgctgatcgtcggtgcgccgccctacctggcccagcatggcatgccggccacgccgcaggcgctgctggggcacaaccgcctcggcgccaactatgtgcgaacgcgctccggctggccgctgcgggacgccggcgaggaactcgtggtgccgttgtcgggcaacgcccaggccagcgatggcgaggcgctgcgccgtctggccgtggccggcctgggcctggcgcggctggccgcgttccaggtgcgcgaggacatagccgccgggcgcctgattcccgtgctcgaggcatacaacccgggcgacctggaggaagtccacgccgtctacgtcggccagggcggctatctgccgctgcgcgtgcgggcgttcctgaactttctggcggagcgcgtcgatatgagccagggttgattcgctgtgccgcatgaatccaccgatttcgcggccgaaggcttttcttcctagcgcttcagtaacaggaggcaatccagatgagcgatgacatccagcgttaccccagcagcctgccgtttcccttttcccgcgcggtgcgggccggcggcttcctgtttctttccgggcaggtgccgatgagcccgagcggcgaggtggtgcgtggcgatatccagacccagaccgaagcggtgatggcacgcatcggcgagacgctggagaactgtggcgcgcgtttcgaccaactggtgaaggtcaccgtctggctgtcggacatggcccacttcgccggtttcaacgaggtctaccagcgtcatgtgcagggggccttgccggtacgctcgacggtgaccgccgggctggcgctgggggtcgacgtggaggtcgaggtgcaggcgtgggtcggcgagggctgagtcgcgagggcattggcatgcaggtcgggtgagcgctggccgcggacggtgaagacgggagggcctccccgtggcgtccgacctgaatcgcttcaggccgctggagtgccgttgccgaatgcctgttcgtcgagcaggcgcatgaaggcgcgcgcggcgttcgacagggtccgctcggtgtgcaggatgtagccgagctggcggctgagctggatgtcctgtagtggcaggcgcaccacctggtcgtcgagcatggtccgcggcagcacgctccaggccaggccgatggagaccatcatcttgatggtctccaggtagttggtgctcatggcgatgttcggcgtcagcccttcggcttcgaacatgcgccgcacgatgtggtgggtgaaggtgttgccgccggggaataccgcggggtgcttggcgacgtcggcgaggaacaccgtgccctgtcgggccagcgggtgctccggggcggcgacgaagtccagcgggtcgtcccacaccgggactgcgcgcaccggttcggcggtttccggggccagggtgatcaccgccagttccgcacgaccatgaaggatctcctcgtaggccacttccgaatccaggaactggatatccagcgccacctgcggatgcgcccgggtgaaggcgcgcagcagcggcggcaggcgatgcaggccgatgtggtggctggtggccaggaccagccggccgctgacctcgccggtgaggttgttcagcgcccggcgggtgtcgtcgagcacgttgagcaactggtaggcgcgcggcagcagggcgcggccggcctcggtgaggttgacctcgcggccgacccggtcgaacagccgggcattgagctgctgttcgagggcggcgatgcgcttgctcaccgccggttgggtcaggtgcaggcgctcgccggcttcggagaagctgccggtctcggcaatggcgatgaaggtgttgaggctgttcaggtccattgcgggcctccgctggtttcggctgcccggagcttagcgccaatggattcctgttgggaatgctttggatgaaaaatatgaatttgagttattcgtagacaagccataggatcatcctcacaagccctgtgggcatagaaatgagctgatgaggaaatcccgatggccggcaagaccctctacgacaaactctgggacatgcacctggtcaagcagcgcgacgacggttcggcgctgatctacatcgaccgccatatcctgcacgaagtgacctcgccgcaggccttcgagggtcttcgcctggccgggcgcaagccgtggcggatcgacgccaacatcgccaccccggaccacaacgtgccgaccacccgcaccgagcgcaagggcggcatcgccgccatcgccgacgaggtctcgcgcctgcaggtgcagaccctcgacgagaactgcgacgacttcggcatcaccgaatttaagatgaacgacgtgcgccagggcatcgtccatgtggtcggtccggagcagggcgcgaccctcccggggatgaccgtggtctgcggcgactcgcacacttccacccacggcgccttcggcgcgctggcccacggcatcggcacttccgaggtagagcatgtgctggcgacccagtgcctggtggcgaagaagatgaagaacatgctggtcaaggtcgaaggcaggctgccggccggcgtcacggcgaaggatatcgtcctcgcggtgatcggcaggatcggcaccgccggcggcaacggccacgccatcgagttcgccggcagcgccatccgcgacctgtccatcgaagggcggatgaccatctgcaacatgtcgatcgaggcgggcgcccgcgtcggcctggtcgccgtcgaccagaagaccatcgactacgtgaagggccggcccttcgcgccgagcgccgagcaatgggaccaggccgtcgcctgctggcaggggctggtgtcggacgccgatgcccgcttcgataccgtggtcgagctggacgccgcgcagatcaagccgcaggtcagctggggcacgtcgccggaaatggtcttggcggtggaccagaacgtgccggacccggcccgcgagagcgacccgatcaagcgcggttcgatcgagcgcgccttgaagtacatgggcctgcggccgaaccaggcgatcaccgacatccagctggaccgggtattcatcggttcctgcaccaactcgcggatcgaggacctgcgcgctgccgccgaagtggccaggggccgcaaggtcgccgcgaccatcaagcaggcgctggtggtgccgggttccgggttggtcaaggagcaggccgagaaggaaggcctggaccggatcttcatcgaggccggcttcgaatggcgcgagccgggctgttccatgtgcctggcgatgaacccggaccggctggagagcggcgaacactgcgcctcgacctccaaccgcaacttcgagggccgtcagggcgccggtggccgtacccacctggtcagcccggcgatggccgccgccgcggccgtcaacggccgcttcatcgatgtccgcgaattgctcgcctgaggagaaccgagatgaaaccctatacccagacgaccggtctcgtcgctccgctggatcgcgccaacgtcgataccgatcagatcattcccaagcaattcctcaagtcgatcaagcgcaccggcttcggccccaacctgttcgacgaatggcgctacctggatgtcgggcagccgggacaggacaactcgaagcgtccgctgaacccggacttcgtcctcaaccagccgcgctaccagggtgccagcgtactgctggcgcgggagaacttcggctgcggctcgtcccgcgagcacgcgccctgggcgctggacgagtacggtttccgcacggtgatcgcaccgagctatgccgacatcttcttcaacaacagtttcaagaacggcttgctgccgatcatcctgcccgaggccgaggtggacgaactgttccgccaggtcgaggcgaacgaaggctaccagttgtccatcgacctggcggcgcagaccgttacccgtcctgatggcaaggtgctgggtttcgaggtcgacccgttccgcaagcattgcctgctcaacggcctcgacgacatcggcctgacgctgcaggacgccgatgcgatccgtgccttcgaggacggctaccgccagcagcagccctggctgttccgctgagcgccacgtgagtccccttgccgggcgcatcctgggtagggtgcgcccggtttttctcccggagtaggttcatgagcgaccacgatgacgttgtccagcgccagttcggcgcccaggcttcggcctacctgagcagcgccgtgcatgcccagggcgaggaattcgccttgctgcgcgacgccctggccgggcgcccggaagcgcgggtcctcgacctgggctgcggcgccggccacgtgagcttccaggtcgccgccctggcaggggaggtggtggcctacgatctttccgccgagatgctcgccgtggtggcgcagagcgccgcggaacggggcatggcgaacatccgtaccgaacagggcaaggcggagagcctgcccttcgccgacggcgagttcgatttcgtcttcagtcgctattccacccatcactggcgcgatgtcggcctggccctgcgcgaggtgcggcgggtgctcaagcccggcggggtggcgatcttcgtcgacgtggcggcgcccgggcaggccttgccggacaccttcctgcagaccgtcgagctgctccgcgacaccagccatgtgcgcaactactcaccggccgagtgggcgcgcctgagcggcgaggcgggcttgctggtaaccggaagccggcgccagcgcctgcgcctggagttccagtcgtgggtcgagcggatgcgtacgccggaggtgttccgccaggcgatccgcagcctgcagctggcggtgggcgaggaagtcagggagtatttcgagattgccgacgacggctcgttcagcaccgacgtgctggtgctgtggctgcgtcgggagtgacggttcgatcgcggcggcgcatgcccgccgttcaatgaatgaaggacaagagggtgttatgagcaagcagatcctggttctccccggtgacggtatcggcccggaaatcatggcggaagcggtcaaggtgctggaactggccaacgacaggttccagctcggcttcgagctggccgaggacgtcatcggtggcgcggccatcgacaagcacggcgtgccgctggccgaccagaccctgcagcgcgcgcgccaggccgatgcggtgctgctgggcgcggtaggggggccgaaatgggacaggatcgaacgcgatatccgtcccgagcgcggtctgctgaagattcgctcgcaactgggcctgttcgccaacctgcgtccggccatcctctatccgcaactggccgcggcctccagcctgaagccggaagtggtcgccgggctggacatcctcatcgtccgcgaactgaccggcggcatctacttcggccagccccgcgagcagcgcgtgctggagaacggcgagcgccaggcctacgacaccctgccgtacagcgagagcgaaatccgtcgtatcgcccgcgtcggtttcgacatggcccgcgtacgcaacaacaggctctgctcggtggacaaggccaacgtcctcgcctccagccaactgtggcgggaagtggtggaagaggtggcgaaggactacccggacgtcgagctttcccatatgtacgtggataacgccgccatgcaactggtgcgcgcgcccaagcagttcgacgtgatggtcaccgacaacatgttcggcgacatcctgtcggatgaggcttccatgctgaccggttccatcggcatgctgccttctgcctcgctcgacgcgaacaacaagggcatgtacgaaccctgccacggttccgccccggacatcgccggtcagggcatcgccaacccgttggcgaccatcctctcggtctcgatgatgttgcgctacagcttcagccaggcgaccgccgccgacgccatcgagcaggcggtgagcaaggtcctcgaccaggggctgcgcaccggcgacatctggtccgaaggctgccgcaaggtcggcacccgggaaatgggcgatgccgtagtcgcggcactcaagaatctgtaatctgacgggcttggccggcgccatgatggctgccggccagctcacttctctcatataggtgtagttgcgatgaagcgtgtaggtctgatcggttggcgcgggatggtgggttccgtactcatgcagcggatgctggaagagcgggacttcgacctgatcgagccggtgttcttcaccacgtcgaacgtcggtggccagggcccggaagtgggcaaggacatcgctccgctgaaggacgcctacagcatcgacgagctgaagaccctcgacgtgatcctgacctgccagggcggcgactacaccagcgaagtattccccaagctgcgcgaggccggctggcagggctactggatcgatgccgcctccagcctgcgcatggaagacgacgcggtgatcgtcctcgacccggtcaaccgcaaggtcatcgaccaggctctggacgccggcacccgcaactacatcggcggcaactgcaccgtcagcctgatgctgatggccctgggcgggctgttcgacgccggcctggtcgagtggatgagcgccatgacctaccaggccgcctccggcgccggtgcgcagaacatgcgtgaactgctcaagcagatgggcgccgcccatgcatcggtggcggatgacctggccaacccggccagcgcgatcctcgacatcgatcgcaaggtggcggagaccctgcgcagcgaagccttccccaccgagcatttcggcgcgccgctgggcggcagcctgatcccctggatcgacaaggaattgcccaacgggcagagccgcgaagagtggaaggcccaggcggagaccaacaagatcctcgcccgcttcaagaacccgatcccggtcgacggtatctgcgtgcgcgtcggcgccatgcgttgccacagccaggcgctgaccatcaagttgaacaaggatgtgccgctgaccgacatcgagggcctgatcagccagcacaatccctgggtcaagctggtgccgaaccaccgcgaggtaagcgtgcgcgagctgaccccggccgctgtcaccggcaccctgagcgttccggtcgggcgcctgcgcaagctgaacatgggctcccagtatctcggcgccttcaccgtcggcgaccagttgctgtggggcgctgccgagccgctgcggcgcatgctgcgcatcctgctggagcgctgatcgatccggtgccgcccgcaatgggcggcgcctcgattgcctgggcgaaggtgggcaagtaaagtgccacgcctatttcgcagaccgccgaggcttttcccatgtcccagcccctcaatgtcgcagtcgtaggcgccaccggatcggttggcgaggctctggtcggtctcctcgacgaacgcgacttcccgcttcatcgtctgcacctgctggccagcgccgagtcggccgggcagcgcatgggtttcgccgaaagcagcctgcgcgtcggcgatgtcgatagcttcgatttttccagtgtcggcctggccttcttcgccgcggcagccgaggtgtcgcgtgcccatgccgagcgcgcccgcgcggcgggttgttcggtgatcgacctgagcggcgccctggaaccgagcgtcgcaccgccggtcatggtttcggtgaatgccgaacgcctggcctcccaagcggcgccgttccttttgtccagtccttgcgccgtagccgccgaactgtgcgaagtgctggcgccactcctggccacgctggattgccggcaactgaacctgacagcctgcctctccgtctccagcctggggcgcgaaggggtcaaggaactcgcccggcagaccgccgaactgctcaatgcgcgccccctggagccgcgtctcttcgaccgccagatcgccttcaacctgctcgcgcaggtcggcgcggtggatgccgaggggcacagcgcgatcgagcggcgcatcttcgcggaggtgcaggccttgcttggcgagcgtatcggaccgttgaacgttacctgcatccaggcgccggtattcttcggcgatagcctcagcgtgaccctgcagtgcgcggaaccggtggacctggccgcggtgacgcgggtcctcgatgcgacgaaaggtatcgaatgggtcggcgagggcgattatccgacggtggtcggcgatgccctcggccaggacgagacctatgtcggccgggtgagggcggggcaggctgatccctgtcaggtcaatttgtggattgtgtctgataatgtgcgaaaaggtgccgcgctgaatgccgtgctcctgggtgagttgttgataaaacactatctgtaaaagatacttacccacagatttgtagaattattcgagcttgttaatactggttcgatccgctgctgccggggagcgtccgtccatgcatggctgggcgagcggacagcaagcaccgacgcactccctctcgtgaaacgagaaaagatattaaaaccaagggattacactatggttcggcttcgtacactggttcgggcaatcgcggcggcctcggtcctgacttccggcatggcgcatggattgggactgggggaaatcaccctgaagtcggcgttgaaccaaccgttggatgccgagatcgagctgctcgaagttcgtgacctgggttcgggcgaggtgatcccgagcctggcgtcgccggaagagttcagcaaggcgggcgtcgatcgcctgtactacctcaccgacctgaagttcacgccggtggtgaagcccaacggcaagagcgtcattcgcgtgacctcgtcgaagccggtgcaggagccctacctgaacttcctggtccaggtgctctggccgaacggccgcctgctgcgcgagtacaccgtcctgctggatccgccgctgtactccccgcaggccgcggcaagcgctccgcaagcgccggtcagcgcgccgcgcgcgaccggcgccccgcgagccccgcaggctccggctccggtgcgtaccaccgcgccggcaggcagcgacacctatcgcaccgtttccaacgacacgctctgggagatcgcccagcgcaaccgtaccgatcgcgtttccgtaccccaggcgatgctcgcgttccaggaactgaatccgggcgccttcgtcgatggcaacatcaaccggctgaagagcggccaggtcctgcgcattcccaccgaacagcagatgctggagcgctcgccgcgcgaggcgctgtcccaggtgcaggcgcagaaccagagctggcgcggcagccgcaatccggccgcgggcagcgctggcgccaggcagttggatgcgacccagcgcaatgccgccgggtcggcgccatccaaggtcgacgccacggacaacctgcgcctggtgtctggcgagggcaaggccagcaagggtgccgacaagggcgggaagggcgacagcaaggcgctcgccgataccctggcggtgaccaaggaaagcctcgatagcactcgccgcgagaacgaagaactgcagagccgcatgcaggatctgcagagccagctggacaagctgcagaagttgatccagttgaaggacgcccagttggccaagctgcaagggcagttgggcgccgaaggccagggcgcagcccagccgaacgcagccctgccggatgcgtcccagcccaatgcagccgcgcaggcgccggctcagcccgggactcccgctgcggcagcgccgactcctgctccagccggagaagcacccgccgctccggcgcagcctccggtggcgccgccgcccgcgccagctgccgagaagcctccggcacctgccgttccggcgcccgctccggtacaggcggcagagcagccggcaccgagcttcctcgacgaactgctggccaacccgctgtggttggcggtgatcggcggtagcgcactgctggcgttgctggtgctgctgatgatcctgtcgcggcgcaatgcgcagaaagagaaggaagaagcccaggctttcgccgcggatgccggcgaggaacaggaggatgcgctggacctgggaaaggacggcttcgacgacctgaccctcgacgagcctgagccgcaggtcgcagccgctgcgccgcaggtcgagaagaccaccgcgcagacttccgatgctctgggcgaggccgacatctatatcgcctacgggcgtttcaaccaggccgccgaactgttgcagaacgccatctacgacgagccgcagcgcaccgacctgcgcctcaagctgatggaagtctatgccgagatgggcgatcgcgaaggtttcgctcgccaggaaaacgagctgcgcgaaatcggcggcgcacagccgcaggtcgagcagctcaagtcgcgctatccggcaatggtcgcggtcgccgcggttgccggcctggccggcgccaagctggcgcaggacgagctggatagcttcagccttgacgacctgtcgctcgacgacagcggtcacgcggccaagccggatgcggcaggacaggatctcgacgacgccttcgacctgagcctggacgacctgggcggcgacgacgtgcaggccgacctcaagtccgacagcggggcgctggacgacctgaccctggacagcgatctggacctggcggcctcgaccccggcggacaagcctgtcgacgatctcgacttcggcctggatttcgcggagttggcagagactccgagccaacccaagcatgacgacctgggcgatttctccctggatctcgacgcgccggaagacaagctttcggacgacgacttcctgctttcgctgaacgacgaagtgcccgccgcggcgcctgccgacaacgaattcaccctcgataccgaggctgccgaagagccggcgttgtccctgccggacgacttcgacctgtcgctggccgacgagccgacggagccggccgctccggagaagggcgaggacagtttcgccgcccagttggacgaggtgagtgcgcagttggacgagttggccagcaaccttgacgagccgaagagcgcgacgccgagtttctccgccgaggatgcagcggtcgcctccgccctggacggagacgccgacgatgacttcgacttcctctccggtgccgacgaagcggcgaccaagctggatctggctcgcgcctacatcgacatgggcgatagcgaaggcgcgcgcgatatcctcgacgaagtcctggccgaaggtaacgacagccagcaggcggaagcccgcgagttgctggagcgcctggcctgatccggaaatgaagcgaccctcatgaacgatgttgttccgccagcggcagccgaatcggctgccgctggcgtttccagaatcgccctcggcatcgagtacaagggctcccgctatcgtggctggcagcgccaggaagccggcgtgccttccgtgcaggaagcgctggagcgcgccttgtcgaaggttgccgccgagccggtcggggtgatctgcgccggccgtaccgacgctgccgttcatgccagcggccaggtggtgcatttcgacaccgcggtggagcgcccgttgaaagcatgggtgatgggcaccaacgccaacctgcccgcggatatcagtgtgacctgggcgagggtgatgccggcgcatttccacgcgcgcttctcggccatggcccggcgctatcgctacgccatctacaacgatccgatccgcccggcgcacctggccgaggaggtcacctggaaccatcggccgctggatatcgggcggatgcgcgaggcggcccaggtactggtcggcacccatgacttcacctcgttccgggcggtgcagtgccaggccaagtcgccggtcaagaccatgcatcacgtgcgcttgctggagcatggtcggttgatcgtgctggacatccgcggtaacgctttccttcaccatatggtgcgcaacatcgctggcgtcctgatgaccatcggtgccggcgagcggccgatcgaatgggcgaaggaggtgctcgaggcgcgcgaccggcgcgccggtggggtcaccgctcacccctacggactctatctggtgcgggtggagtaccccggggagttcgagttgcccgagcgctacctggggccgcatttcctttccggattgcccgatatcgtcggctgacgtcgaatcgggcttttgctaccatcgagaattcccgccggaccggccgtccggcggttcgtcgctcactcgccgaggattctccgtcgttgccagccgttcgcatcaagatctgcggtatcacccgagtcgaggacgccctggccgctgccgcggcgggcgccgatgccatcggcctggtgttctatgcgaagagcccgcgggcggtggatatccatcgggcgcgggagatcgttcgtgccctgccgccgttcgtgaccagcgtcggcctgttcgtcaacgccagccgctgcgaactgggcgagattctcgatgcggtgccgctggacctgctgcaattccatggcgacgagcgcgccgaggactgcgagggacatcggcgaccctacctgaaggccctgcggatgaagcccggcgacgacatcgtcgggcgcgcggcggcatatccgggagctgccgggattctcctggatacctatgtggaaggcgtgcccggcggcacgggggcggcgttcgactggtcgctggtgccgaccgacctgggcaaacccctggtgttggccggcggtctgacgccggataacgtcggcagggcagtcgagcaggtcaagccctacgcggtggacgtcagcggtggcgtcgaggcgagcaagggaatcaaggatgcggcgagggtccgtgcgttcgtggacgcggtgcgttcgcggcgccgcgacgagacatgatgtgacgacgggcggcccgccgccgtccactagcgtgtcgccgtttccgcgacaacgcccggccgccgatagggaggccagatatttcgcgatagccgctcgccgggtatcgcccaggtgaccgcgcaggcgggggatgggacaggccgcgaaacgcttcgcagccgtggggcccaccgctgccggcggtcacgaagatgaatttgctcagggacgccgtcaccggatcggtgcggccatcccgaccttgcactggagaacaaagagcatgagcaactggctggtagacaagctgatcccttccatcatgcgttccgagtcccagaagagttcggtaccggaaggcctgtggcacaaatgcccgtcctgcgaagccgtgctgtaccgtccggagctggaaaagaccctggatgtctgcccgaagtgcgaccaccacatgcgcatcaacgcgcgtacccgcctggacatcttcctcgatgaggacggccgcgaggagctgggcgccgacctcgagccggtggaccgcctgaaattccgcgacagcaagaagtacaaggatcgcctcgccgcggcacagaaggacaccggcgagaaggacgcgctgatcgccatgagcggcaagctgcagggtatgccggtggtcgcctgcgccttcgagttctccttcatgggcggttcgatgggcgccatcgtcggcgagcgcttcgttcgcgcggccaacgccgccctggagaagcgctgcccgctgatctgcttctccgcctccggcggcgcgcgcatgcaggaagcgctgatctcgctgatgcagatggccaagacttcggcggtcctggcgcgcctgcgcgaagaaggcatcccgttcgtctcggtattgaccgacccggtctacggcggcgtttccgccagcctggcgatgctcggcgacgtgatcgtcggcgaacccaaggcgctgatcggcttcgccggtccccgcgtgatcgagcagaccgtccgcgagaagcttccggaaggcttccagcgtagcgagtttctccttgagcatggcgccatcgacatgatcgtgcatcgtgccgagttgcggccgcgcctggccaatctgctgtcggccttcactcattcgccgagccccgtatccgcatgacccagcgttccctggccgattggctgagctatctcgaacaactccatccgacggccatcgacatgggcctggagcgttcccgcgaggtagcgcgccggctcggcctgggaaggccggcgaaacgcgtggtcaccgttaccgggaccaacggcaagggctccacctgcgccctgctcgccgaactgctgcgtgagcaggggttgtcggtcggggtctacagctcgccgcacctgctgcgctacaacgagcgggtgcggatcgatggtgtcgaggccggcgatgcgcaactgtgcgacgccttctccgcggtggaggccgcacgtggcgagatttccctgacctatttcgaaatgggcacgctggccgccttctggctgttcgagcgcgccgggctggacttcgcggtgctggaagtcggccttggcgggcgcctggatgcggtcaacctgatcgacgccgacctggcgctgatcaccagcatcggcctggaccatgcggactggctgggcgatacccgcgaaagcgtggctttcgagaaagccggtatcctgcgcgccggcaaaccggccctgtgcggcgatctcgatcccccgcagccattgctggagcaggtggctgcgctgggggcaccgctttacctgcgcggtcgcgactacgacctggcgctcgccgatcatggctggcactggcgcgggctggccgcggacggccaggcgctggcgctgcacgatctgccgttgctcgggttgcccatggaaaacgccgcgctggccctgcaggcctacgcgttgctcgagttgccctggcaggcggagcgcctggccgaggcgctgcggcggacccgggtgaccggtcgcctcgatcgccgcgacctgtcctggaacggccagccacgccagctcctgctggacgtcgggcacaatccccaggccgcccagtacctggcgcaacgcctgcgtgccgcagcgccacgagggcgctacctggcggtcttcggcctgctggcggacaaagacctggatggcgtactggaacccttgaccggcttggtgcaggattgggccgttgcaccgttgccgaccccgcgttcgcggccggccgcggagctggaggcggcgctgatcctgcgccaggttccggcgagcagccatgcggatatcgccgccgccctggacgcgcagtgcgccaaggctaccgcggatgatgtcattctgctgttcggatcgttctatagcgtggccgaaggcctggaatggctggcccgtagaacggataagggggagtaaatcatggccttgctggaaagagggctgaagcagcgcatcgtcggggcgttggtgctgatcgccctggcggtgatcttcctgccgatgctgttcacccgcgaagacgagtcgcgccaggtcgtggtggaagcgccgccgcgcccgcaatcgccggccatgcccagtgtcgaggtgcagccgaccgaggtgccggaactgcagcccggcgaggaaggcatcgctcccgagatcgtcgaggaaggctccccggccgccgccggccagcccagccagccgatcggcggcctgtcggcgaccccgccggccacccagccgcccgcccaggcccaggcgccggccgccagcctgccgccaagccagccgcaaccgcccgctgcgccgccgagcccgccgcccgcggagaagcgcctggacgccaacaacctgccgcagagctggtcggtacagcttgccagcctgtccaaccgggcgcgcgccgaggaattgcagaagaccctgcgctcccagggctacaacgcctacatccgcagcttcgacgggatgaaccgggtcttcgtcgggccggtgatccagcgcgccgaggcggatcgcctgcgcgaccagttgagcaagcagcagaagctcaacggcttcgtcgtgcgcttccagccggaacgcggttgaccgcgacccgcggcttaccgtcgcgggcgcgctctgctaaaatgcagcgccttttctgcttgtgggctgcatagtggcatttacctgggtcgattggacgatggtcgccatcatcgtcgtttccagcctgatcagtctgagtcgcggcttcgtcaaggaagccttgtccctgcttacctggatagtcgccggcgcggtggcctggatgttcggcggggcgctggcgcagcacctgggcgaatacatccagaccccctcggcccgcatcatcgcagcctgcgcgctgctgttcatcgcgaccctgctgctcggggcgctggtcaactacctcatcggcgaactgatccgggtcaccggcctctccggcaccgaccgcttcctcggcatggtcttcggcggtgcgcgcggcgtactgctggtcgtgctgctggtcggcctgctcagcctggccccggtacagcaggacccttggtggcagcagtcggtgctgatgccgcatttcctgatggttgccgactggtcgaagaacttcattctcggtttcgccggccagtggttgccggccgcgccgataacgccgccgagcggcatcggcgggctgcttcccagccagtgattttggcgggacactggccgaggccgggtcccgcggttttccagggcggcgcgtcgatggcgcggcgccggcggcacaggacgtgccgcgagccagtcggcggcgaaggtcgccgattcgcgggagccagcggcccacaggccctggtcagctcgatggtccgggacggaccgatcgcgcttcccatctttccagcttgagccaagtaggggttgcgtcacatgtgtggcatcgtcggtatcgtgggcaagtcgaacgtcaatcaggcgctgtatgacgcgctcaccgtcctccaacatcgcggccaggacgctgccggtatcgtcacctgccatgacgataagctgtacctgcgcaaggacaacggcctggtccgcgacgtcttccagcagcgccacatgcagcgcctgatcggcagcgtcggcatcggccatgtgcgttacccgaccgccggcagctccagctcggcggaagcgcagccgttctacgtcaactcgccctacggcatcaccctggcgcacaacggcaacctgaccaatgtcgagcagttggccaaggaaatctacgaatccgacctgcgtcacgtgaacaccaactccgattcggaagtgctgctcaacgtgttcgcccacgagctggcggtgcgcaacaagctgcagcccaccgaggaggacatcttcgccgcggtttcctgcgtgcacgaccgttgcgtcggcggctacgcggtggtggcgatgatcaccggccatggcatcgtcggtttccgcgaccccaatgcgatccgtccgatcgtcttcggccagcggcataccgagaatggcgtcgaatacatgatcgcctccgagagcgtggccctggacgtactcggcttcaccctgatccgcgacctggcgccgggcgaggcggtgtacatcaccgaggaaggcaagctctatacccgccagtgcgcgaaggcgccgaagtacgcgccgtgcatcttcgagcacgtctacctggcgcgtccggattcgatcatggacggcatctcggtgtacaaggcgcgcctgcgcatgggcgagaagcttgccgacaagatcctccgcgagcgtcccgaccacgacatcgacgtggtcatcccgatcccggacaccagccgcaccgcggcgctggaactggccaaccggctcggcgtgaagttccgcgagggcttcgtcaagaaccgctacatcggccgcaccttcatcatgcccggccaggcggcgcggaagaaatccgtgcggcagaagctcaacgccatcgagctggagttccgcggcaagaacgtgatgctggtggatgactccatcgtccgcggcaccacctgcaagcagatcatccagatggcccgcgaggccggggcgaagaacgtctacttctgctccgccgcgccggccgtgcgctaccccaacgtctacggcatcgacatgccgagtgcgcacgagctgatcgcgcacaatcgcagcaccgaggacgtcagcaagctgatcggcgccgactggctggtctaccaggacctgcccgacctgatcgacgcggtcggcggcggcaagatcaagatcgatcacttcgactgcgccgtgttcgacggcgagtacgtgaccggcgacgtcaacgaggcttacctgaaccggatcgaacaggcgcgcaacgatgcgaccaaggccaagagccaggcggtcagcgcgatcatcgatctgtacaacgactgacaaaggggagagcggcatgactcaggactgggatgccgggcgtctcgacagcgacctggaaggcgcggccttcgacaccctggcggttcgcgccgggcaacggcggacgccggagggcgagcacggcgaggcgctgttcaccacttccagctacgtcttccgcaccgccgccgacgcggccgcgcggttcgccggcgaagtgccgggcaacgtctattcgcgctacaccaaccccacggtacgcaccttcgaggagcgcatcgccgccctcgaaggagccgagcaggcggtggccacggcgtcgggcatgtcggcgatcctcgccctggtgatgagcctgtgcagctccggcgaccacgtgctggtctcgcgcagcgtgttcggctcgaccatcagcctgttcgacaagtacttcaagcgcttcggtatccaggtcgactatccgccgttgagcgatctcgcggcctgggaggcggcgtgcaagccgaataccaagctgttcttcgtcgagtcgccatccaacccgctggccgagctggtggatatcgccgcgctggccgagatcgcccacgccaagggtgcgctgctggcggtggacaactgcttctgcacgccggccctgcaacagccgctgaagctcggtgcggacgtggtgatccactccgcgaccaagtacatcgacggccagggccggggcatgggcggggtggtcgccggtcgcggcgagcagatgaaggaagtggtcggcttcctccgcaccgccggaccgaccctcagcccgttcaacgcctggctgttcctcaagggcctggaaaccctgcgtatccgcatgcaggcgcacagcgccagtgccctggccctggccgaatggctggagcgccagccgggcatcgagcgggtctactacgcgggcctgccgagccatcctcagcatgagttggcccggcgccagcagagcggcttcggcgcggtcgtcagcttcgacgtgaagggcgggcgcgatgccgcctggcgcttcatcgacgctacccggatggtctcgatcaccaccaacctgggcgacaccaagaccaccatcgcccacccggcgaccacctcccacggtcgactgtcccccgaggaccgcgcgcgcgccgggatcggcgacagcctgatccgggtcgcggtcggcctggaagacctcgacgacctcaaggccgacatggcccgggggctggccgcgctgtgatcgagcccaacctgcgaggcaacggcaaggtcgccctggtcaccggggcggcccggggcattggcctgggcatcagtgcctggctgatcgccgagggctggcaggtagtgctggccgacaacgaccgtgaacgcggtgccagggtggccgaggcgctgggcgagcacgcctggttcgtggccatggacgtggcccaggagggccaggtggcgatgagcgtggccgaggtgctcggtcagttcggccgcctcgacggcctggtctgcaacgccgccatcgccaatccgcgcaatacgccgctggaggcgctgagcctcggcgagtggacccggaccctggcggtcaacctgaccggtccgatgctgctggccaagtactgcacgccttatctgcgcgcgcacaacggcgccatcgtcaacatcgcctcgactcgtgcccaccagtcggagcctgactccgaggcctacgccgcgagcaagggcgggttgctggcgctgacccatgccctggccgccagcctgggcccggagatccgtgtcaatgcgctcagccccggctggatcgatacccgcgaggccgccgagcgcgaggctgcgccgctgaccgagctggaccacgaccaacacctggtcggccgggtcggaacggtggaggatgtcgcgtcgctggtggcttggctgctctccgaggacgccggtttcgtcaccggccaggaattcctggtcgatggcggcatgacccggaaaatgatctacctcgactgagttggtggggagatgcggaaaaggcgctgttccgaaaggagcagcgcctttttttcgtatgaggccgccttgccggtatggcgccgttattccgtcttcagttcgcgcagatcgacggcctgtccatcgaacaactggttggcgttggtcggcaggatgctgggtcgtccctccgggccgcgagtgccgtcgatgacccggatgtcgctgtatttcttgcccgagagcgcggcgagaccggcgctgtcgcggaccaccgtaggacgcaggaagaccatcaggttgcgcttggtgtgggtgtccttggtggaacggaacaggcgaccgagcaatgggatgtccccgagcaggggaaccttcgactcggcttgggaaacgtcgtcctggatcaggccgccgatcacgatcacctggccgttctcggcgaggatggtgctcttgatcgagcgcttgctggtgatcaggtcggtattgttgcgctgctgggcgttgggcagcagggccgagatctcctgctcgatctccaggcgcagggccgcgccgtcgttgatgtgcggagtgaccttgaggctgacgccgatatccttgcgctccacggtggtgaacgggttgctcgcgccttcgctgttggtggtataggagccggtattgaaggggacgttctggccgaccaggatctccgctttctggttgtccagggtcaacaggctcggggtcgacagcaggttgctcttggtgttggccgagagcgcggtgaccagcgcgccgaagctgctgctgccgatgccgacgatggcgccgtcggggatggattccggtgccttgttgctctcgagcgattgcagcagggtgccgatggacagtccggtattggcgaagttggtcttggttccgcccatgccgcccttgttgatcgcccattgcacgccgacggcatcctggatgtcgccggagatctcgacgatggccgcttccaccaatacctgggcacgcggcacgtcgagctggcgaacgatgtcttcgagagcgttgaccgtgtccgggtcggccagcaggaccagggcgttggtgctttcgtcggcacggatgaggatgttgctcggtcggccgccgccggtctgttcgccgccctggccaccattgttcttcatgccttcggaaatctggccgagggtttccgcgagggtcttggcgtcgttgtggcgcaggcggatcacccgggtattggccgagcgcgcggtcggggtgtccagcgactgcgccagttgcaccagcttggcgcgcgcctgcggcgggccgaggatgatcaggcggttggtgcgcgcgtcggcgatcacctgggcgcccgccgcgcccttggcctggccgcggctcatggcgttgttgagcacctcggcggcgtccatcacccagccgtagcgcaggttgatcacgctgtagtcgtggctgcccttctggtcgagctggcggatcacgtcttcgattcgcgcgatattggcgctgcggtcgctgatgatcagcgcgttggccgagggcaccgcggcgaggtggccatattgtgggaccagcggacggatcagcgggatgagttccgataccgggctctgctgcacctggatcacccgcgtctccaggcgatccggcgcgctctggccgccgccggcctcggtcttggcctcggcgttgggcacgatgcgcgcctggtcgccctgggcgaccacggtgaagccgtgggtgctcatcaccgagaggaacaactggtagacctcgctcaacgagagctgggccttggagaccacgctgacctggcccttgacccgcgggtcgacgacgaaggtctcgccggtgatttcggaaatctggtcgatgaattcgcggatgtcggcatccttgaggttgatcgtccagtgcgcctcctgctggttgccggccgggacgaaggcgttcccgccgctgttttcggcgtgcgccgcctggatgccgagggccaggctgagaaggacggcgggaacgtacgaacgactggaaggggcaaacagggcgcggagcaaaggctgggacatcgggtcagtcgctttccgtaggcgtggtcgtgggctcgctcgagtcttcttcggcgggttctgcgatgggcgtggcttccatctgctggcgcaaggcgtccaggcgctcgcgcaatgctgcagcgttctcatcctgcaggctttgcagttgttcgatcgagtcgttctcgcttgtaatgtcgtccgcgctggccagcagtcccccggaacggtgcgggaagggcaggctttccaggcgcccgccgcgctgcagttcgacgcggtcgcggtagaccgcgtgcagcttcacgccgtcgctgatctcgccgccgaccgcgtagcggtgcggcttgtcgccctggcgctggatgatcgcgctggacagcttgggatcgctctggacgaagctgcccttgagcaccaggtcgaggttggtggccggtggcggggcgttggggtcctgggcgctggtgccgaagaggcgcgccaggcgggtcggatcgctgcggatcgactcgtggctgaccggcgaggcggcgacggctaccgggctgcgttgcaggcgcaaccagccggccgcctgccaggcgaggctgatgctcatggcgatgatcagggcaacagccagaagggccggggcgtaccgctgcagccagcgggaagaggcgccggagaaaggcaatacatcactcctggtctttatcgttatgtctgaagatcgccgagggatcatagcagttcgttgccagtaggctacctacttctatcaataggtgtgactggccgggccaggcacgcttgtgcttaagataacggctcgccaggatacttctgcaagaggaactcgggatcggccgcacaaaacgactaacaactaacaatactgacggtaaccgttcagtggtcatatacgaccaagatacttctgtaaggttaccgctataaggcatccatgatgacagccccattacccgacatcgccgcgccggccgcaccgccacggcgtctgccgttcagcttcgccaagcgccagggcctgctgttcctgtgcctggaggagcagtactggctggcctgccggccgcaggtggagctggcggcgatcgccgaggcgcagcgcttcgccggccgccgcctgccgctcaaggcactcggcgaggacgccttcaaccaggccctggcggcctcctaccagcacgattcctcggcggccatgcagctcgccgaggacctcggcggcagcctggacctcgccgcgctggccgaccaggtcccggaaaccgaggacctgatggagcaggaggacgacgcgccgatcattcgcctgatcaacgcgatcctcggcgaggcgatccgcgagaacgcctcggacatccacctggaaaccttcgagaagcgcctggtggtgcgcttccgcgtcgacggcgtgctgcgcgaggtgctggagcccaagcgcgagctggcggccctgctggtatcgcggatcaaggtcatggcgcggctggacatcgccgagaagcgtattccccaggatgggcggatttccctgcgggtcggcgggcgcgaggtggacatccgcgtctcgaccctgccctcggccaacggcgaacgggtggtgctgcgtctgctcgacaagcaggccgggcgcctgaacctgcagcacctgggcatgagcgagcgcgaccgcaagctgatggacgaaacggtgcgcaagccgcacggcatcctgctggtcaccggccccaccggctcgggcaagaccaccaccctgtacgccagcctgaccacgctcaacgaccgcacgcggaacatcctcaccgtcgaggatccgatcgaataccacctggagggcatcggccagacccaggtcaacgccaaggtcgacatgaccttcgcccgcggcctgcgggcgatcctccggcaagacccggacgtggtgatggtcggcgagatccgcgaccgggagaccgccgagatcgcggtgcaggcttcgctgaccggccacctggtgctctcgaccctgcacaccaacagcgccatcggtgcgatcacccgcctggtggacatgggcatcgagccgttcctgctgtcctcctccatgcttggcgtgctggcccagcgcctggtgcgggtgctctgcccggcgtgcaaggagccctaccgggccgacgaggccgagtgcgcgctgctcggcgtcgatcccgccgcgccgccgaccctgcatcgcgcccgcggctgcggcgagtgccaccagcatggctatcgcgggcgtaccggtatctatgagctggtggtgttcgacgaccacatgcgctcgctgatccacaacgaatcctccgagcaggaaatgacccggcatgcccgcaccagcggaccgagcatccgcgacgacggtcggcgcaaggtgctggaaggcgtcaccacggtcgaggaagtcctgcgcgtgacccgggaagaataatggccgccttcgaatacctcgccctcgaccccagcggtcgccagcagaagggcgtgctggaggcggacagcgcgcgccaggtccgccagttgctgcgcgagcgccaattggcgccgctcgacgtgaagcccacccgtacccgcgagcagagcgggcagggcgggcgcctgacgttcgcccgcggactgtccgcgcgcgacctggcattggtgacccggcaactggcgaccctggtccaggccgcgttgccgatcgaggaggcgctgcgcgccgccgcggcgcagtccacctcgcagcgcatccagtcgatgcttctcgcggtgcgcgccaaggtcctcgaaggccatagcctggccggcagcctgcgcgagtttcccaccgcctttcccgagctgtaccgggcgactgtggctgccggcgagcatgccgggcacctcggcccggtgctggagcaacttgccgactacaccgagcagcgccagcagtcgcggcagaagatccagctggcgctgctctatccggtgatcctgatggtcgcttcgctggccatcgtcggcttcctgctgggctacgtggtgcccgacgtggtccgggtgttcatcgacagcgggcagaccctgccgctgttgacccgcgtgctgatcggcgtcagcgactgggtcaaggcctggggcgcgctggccttcgtcgcggcgatcggcggggtgatcggcttccgctacgcgctgcgcaaggatgcctttcgcgagcgctggcatggcttcctgctgcgcgtgccgctggtcggtcggctggtgcgttccaccgacaccgcgcgcttcgcctcgaccctggcgatcctcacccgcagcggcgtgccgctggtggaggcgctggcgatcgccgccgaggtgatcgccaaccggatcatccgcaacgaagtggtcaaggccgcgcagaaggtccgcgagggcgctagcctgacccgctcgctggaagccaccggacagttcccgccgatgatgctgcacatgatcgccagcggcgagcgctccggcgagctggaccagatgctggcgcgcaccgcgcgcaaccaggagaacgacctggcggcgcagatcggcctgatggtcggcctgttcgaaccgttcatgctgatattcatgggcgcggtggtgctggtcatcgtccttgccattcttcttccgatcctttctctcaaccaactcgtggggtaatcgcgtgaatcagagccgcccattgcagcgtcgccaacagtcgggcttcaccctgatcgaaatcatggtcgtggtggtcatcctcggcatcctcgccgccctggtggtgccgcaggtgatgagccgtcccgaccaggccaaggtcaccgtggccaagggcgacatcaaggccatcgctgccgcgctggacatgtacaagctggacaacttcgcctatccgagcacccagcagggcctcgaggcgctggtgaagaagcccaccggcaatccgcagccgaagaactggaacaaggacggctacctgaagaagctgccggtcgatccgtggggcaatccctaccagtacctggcgccgggcaccaagggcccgttcgacctgtattcgctgggcgccgacggcaaggaaggcggcagcgacaacgacgccgacatcggcaactgggacaactgaccggacatgcgggcttcgcgcggcttcaccctcatcgagctgatggtggtgatggtcatcatcagcgtactgatcggcctggcggtgctcagcaccggcttcgccagcacctcgcgggagctggacagcgaggccgagcggctcgccgggctgatcggcgtgctgaccgacgaggccgtgctggacaaccgcgagtacggcctgcgcctggagcgcgatgcctaccaggtactgcgctacgacgaagcgaaggcgcgctggttgccggtggcgcgcgacagccaccgcctgccggagtgggcggagctgaccttcgagctggacggccagccgctggtgctggccggcagcaagggcgagaaggagcagaagaaaggcaccgaccagccgcaattgctgatcctctccagtggcgaactcagtccgttccgcctgcgcctggccgagcgcggacccgaggggcgggcgttgtcgctgagcagcgacggtttccgcctgccacgggtcgaggtggcgcggcgatgaagcgcgcgcgtggtttcaccctgctggaagtgctggtggccctggcgatcttcgccatggtcgcggccagcgtgctcagtgccagcgcgcgcagcctgcagaacgcctcgcggctggaagacaagaccctggcgatgtggatcgccgacaaccgtctcaacgaattgcaactggaacagacgccgccctccagcggccgcaaccagggcgagctggagttcgccgggcgccgctgggagtggcgcacccaggtcgacagcaccgccgagcaggatatgcggcgggtgatcgtctgggtcgcggcgaagccccttggccgcgagcgtggcagcatcgaggaacgcgccgcggcgcgcctcgtcggtttcctcgggagccagccatgaggctacagcggggcttcaccctgctcgagctgctgatcgccatcgccatcttcgccctgctggccctggccacctaccgcatgttcgacagcgtgatgcagaccgaccaggcgactcgcgtgcaggagcagcgcatgcgcgagctggtgcgggcgatgggcgcgctggagcgcgacctgacccaggcggtcgaacgtccggtacgcgacgaactgggcgataaccgtggcgccttcctcagcgagggcgagaacgaccagatcgtcgaattcacccgtggcggctggcgcaacccgctcggtcaggcgcgctcgcgcctgcagcgggtgcgctggtcgctgtccggggagaccctcgaacgccgctactggctggttctggaccgcgcccaggacagcaagccacgggtgcagcaggtgctggacggggttaccgcgctgagctggcgcttcctcgacaaggagcacaactggcagggccactggccgaccgacgaaggcagcgaggaggagcgcctggaaagcctgccgctggcggtggagatgaccctggagcaccgccactacggcaagctggtgcgcgtctggcgtctgctcgatccgccgctcaagcaggaccagccgcagggccagccgggcggcgagaatggcgagaacggcgagggcggagtgccgcagccgccggaaggcatgccgggggcgccggaatgaggcgcgggcagaacggcgtcgcgctgatcaccgtgctgctggtggtggcggtggtgaccatcgtctgcgccgggctgatcatccgccagcagttggcgatacgcagcagcgccaaccagttgcacgtgcgccaggcctggcactatgcgctgggcggcgaacgcctggcggaagcggtgctgcgccgcgacctgcgccagggcggcgagaatacccgcgagccggtggaccacctgggcgaggcctgggcgcgaccgatgacgccgttcaagctggacgacggcggcgagctgcgggtgcggatcgaggaccccagcgggcgtttcaacctcaacggactggtgcgcaagcgcaaggtcaagccggactcggtgaagcagttccgtcgcctgctggccaccctggggatgaaggaagagatcgtccagggcttgccggaccggctggccgactggctcgacgccgaccagaatccgcagggcgagcaaggcgccgaggacaaccagtacctgctggaggcgccggcctaccgcgccgccaaccgcagtttcaaggacgtgtccgagctgcgcctgctgaaattgtcggaagccgactatcgacgcctgctgccgttcgtcagcgccttgcccgaagatgcgccgctgaacgtgaacactgccagcgtgccggtgctggccgccatgttcgagatcgatccgggacaggcggaaaacatcgtggacgcccgcggtcgggaaggtttccagagcaaggacgatttcaccaagcatctgacccagttgggttcgaagaccggaaacgtcagttatgccgtcggcacccgctacttccaggtgatcagcgaggtcagcctgggcgaccgccggcaggtgctggtgagtaccttgcagcggggcaaggacggcaagatacgcgtgatggcccgcgacatggggcagggcggcctgcccatcccgtcgacgggcggcgacgattggaagaaggacgagcgatgagtggagtgagtgcgctgttcctgccgcccgccagcacggcgggggccgatggggaactggcggtatggtgggtgcaggatggcgagtgccggcgcgcgccgttcgcccaggcgctggcggagatccgcgcgccctggcggctgtacctgccggtggaggcggtgaccgcctgcgcggtgaacctgcctacacagaaggcgcgctggttgcgccagtcgctgccgtttgcggtggaggaacaactggccgacgatgtcgagcagatgcaccttgcccttggtccggcgctggccgacggccgccaccgggtattcgccgtgcagcgcacctggctcgccgcctggctggcgctggccgagggcgcgggcaaggcaccggcttcgctgcatgtcgatgccgattgcctgccgggcgagggcagttgcctgttctggctggaagagcgctggttgctcggcggcagcggcgccgtacgcctggcctgcggcagcgaggattggccggtactgcgcgacagttgcccgccgccgcagcgggccttcgccgcgcaggaggtggcgcccctggagggggtggaagtccaggccctggcgggcaatccgcacgtctggctgagcgagcagccgctgggcaccgacctggcccaggccgagttcgccgcgcgccagcagagcagccagtggcgccgctggcggccgctgctggggttggtcgggctgtggctggtattgcaatggggcttcaccctggtccaggcctggcagttgcagcgcgaaggcgaccgctacgcggcgcagagcgcagaactctaccgccagttgtttcccgaggaccgcaagctgatcaacctgcgcgcgcagttcgaccagcacctggccgacagcgccagcagcggcggcgagggccagttgctcggcctgcttggccaggccgccacggtgatcggcggcgagccgacggtgagcgtcgagcaactggacttcagcgccgctcgcggcgacgtcgccctccaggtgcgggctcccggtttcgacgtgctggaacggctgcgttcgcgtctcagcgagtccgggctggcggtgcagctgggttcggccagccgcgatggctcgacggtcagcgcgcgcctggtgataggaggttgagatgaaggtgatgacgcaattccacgagcgcctcagggcccaggcggaaacctcgcagctggcgatccgctggcgcgggctgccggcgcgggaccgcctggcgctgctctggctcggcgcgttcctcctgctggtgatgctctacctggcgctgtggcgcccggccgagcgccatttgcagtcggcgcggcagtacttcaccgaacagcgcgcgctgcatgcctacatccagcagcaggcgcccaacgtgcgccaggccgatgccgcggcgccgcaggcgcagatcgacccggcggcgctgcagggcatggtcacggcttcggcggtccaggccggactgagtgtcgagcgcctcgacaacgaaggcgagggcgccgtgcaggtggccctgcagccggcgccattcgccaagctgctgccctggctggagcagttgaacgggcagggcgtgcaggtggcggaggccggcctggaccgccaggtcgacggccgggtctcggcgcgcctgagcctgcgggtcgagtgagcggcccgtggctgggcccggcctgggccccggcgccgaccgtggcgacaggcgatcgccgaaatttcaaaaaaaattcaatcagggcattgacttaggtttttcggtcggtagaatgcgccccacttcgagagtgaagggtgattagctcagctgggagagcatctgccttacaagcagagggtcggcggttcgatcccgtcatcacccaccaatctcgcaagttacgcgcagcggtagttcagtcggttagaataccggcctgtcacgccgggggtcgcgggttcgagtcccgtccgctgcgccattcacttcccctcccgagttcaccaccccgaactcgccgtcttccactagaaggcgggcagcctggctgcaacgagaggaagtcgctttaccgggcatcttgcccagccgacgcgcagcggtagttcagtcggttagaataccggcctgtcacgccgggggtcgcgggttcgagtcccgtccgctgcgccatacatcttcaccacgccgaggcggggtgagccacgaagaaagcggccaatggccgcttttttcgtttccgtcgtcccctgcgccttccgttttctccttgtttgccggatttcctgctccgtcggtccgcgcgcggtaatcccgctgtcatcttcctcgtctacagctgaaagacacagacgaacgaaggtgatccgcgatggacgactaccaggaagaactgctggagcagcatgccgccgaatgcgatctgccagagccggcggacgacgccaccgagatgtgatcaggcgctctgtcgctgggcgcggcggaattcgccgggcgtctgcccgctccagcgcttgaaggcgcgctggaaggcttccgccgaggcgaagccgagcaggtaggcgatttcgccgaaggccaggtcggtctcgcggatgtagaccatcgccaggtcgcggcgggtgtcgttgaggatgctgcggaactgggtgccttcctcggccagcttgcgccgcagggtccaggtcggcaacttgaggcgcgcggcgatttcctcgaggtccggttcgcgaccattgagcatcggccccagcaggcggctgacgcgctcgcgccaactgcgggtgcgggtcaactgctccagttcgcggttgcagagttccagcatctggctccaggtgctcggacagtgctcggcattcgccagggccaggctggcctggctcaggcgcaactggttggtcggcgcgccgaattccaccgggcagccgaagaatgcctcgtagcgctcggcccaaggcggcgctggatattcgatctccacccgctccgctttcaacggctgccttgccagggcgccgagatggctgatccagcctgccagcaccgaatcgacgacgaagcggttataggcgttgtaagggctgatcgaatagaagcgcagccaggcgccgccggcgtcttccaccaggctcgactggccccggtagttctgcgcgtaaagcggttccaggtggatcattgcccgcgcggcggcgcgcaggttgggcgcctgggcgacgctgacgccggccaggcccatctgtccgagacggctcaggcggcccatctgcaggccgagggcggggtcgccgctgagctgtatggcggcatggccgaggcgcatgtagcgagggatcgacaggcgcgccccgggttcggccaggcgccgctggtcgaggccgtactgctcgagcagtggtgcgggctcgacgccggcggcgagcagggcgtcggccagcgcctggacgaagccgaccgagaggtcgccgaggcgaacccggggcgcgctcatagccagagattgaccagttgcgcaccgccgccgggattggcctggcgcatgccctgcgacgaaccgagcaggctctggccgtcttcggtgacgttccacaggcggctatgggcgaaggccacggcggcgccgcgcgcaccgctggccagcaggcgctcgccgaccgccaggcgctgccaggcctcggcgttgctcaggctgttcggcgccaggcgtacgtcgccgggaaccagctccgcatcgaagccgggccagggctgctgccagcgaccgctctggttcagggcggcggggatcgccagcagttcgacgcgctgttcgaccagggtggcgtaggtgtccgggtaccagctgtcggtgccgatcagcacgcccaggcgtcctgccggcgtatccagcacctgcaggcgctcgccgcgaccgttgttgaggtagctcagttcgtggcgggtcgggaacaccttgcgttgcggctggccgagcggccggccgtcgggaccgaaggtcaggctgacgttgtacagctggccggtgccgggacgcagctcgccgtcctcgacctcggggtcgggcaggacgatggagccggcgaccaccgtcaccttgaaatcatgggcgagcccgccgaacagggtctggtagtcgtgggccatgtccaccgccttcatccggaacagggtgtcggtgagacgctgatcgccgcgcgcggtgatccagccgcgcgccaccttcagtgggttgctcgcggccatccagtccatcgccgtgggccagtcggcagcggcgtagacctcgggcttctcgccgctggccaccagccaagtgccgacatgctcggggaacaccaccaccgtgcgctcgttgagcaggccctggcggcgggcattttccaggtaggcgtggaatttcagttgcaaccgttcggcgctctggtagtccggcgtgaacagttccggctggaccgccagcagattgccgcgctcgccgggctggccctggaccacgctgacctggctgcgcaggtcggacaggtagtggcctaccgggcggcgttcggcccagccggcgtaggcggcgaagagggtgatgaggatcaggaagatcagcttgcgcatgcgggtctccaaggcagcccacagggtaggggagtggcgtcggcttgccaagcatccctgtgcattccgatcagtaacttgtcatttaggatcattgagcgctccggtggcgctccttagagtcgtcgccataccgaccgctgcccgtcccgcgcattgcgcccgaggccgcggcatatccgtgaacgcgtttcgcccgatgtggagacccccgatgaccgccgccgttccctatccgcacctgctcgccccgctggacctcggcttcaccaccctgcgcaaccgcaccctgatggggtccatgcacaccggtctggaagagaagccgcagggcttcgagcgcatggcggcgtatttcgccgaacgcgcccgtggcggcgtcggcctgatggtcaccggcggcatcggcccgaacgaagagggcggcgtgtattccggcgcggccaagctgagcacgccggaagaggcggagaagcacaggatcgtgacccaggcggtgcacgaggcgggcggcaagatctgcatgcagatcctgcatgccggccgctacgcctacagcccgaagcaggtggcgccgagcgcgatccaggcgccgatcaatccgttcaagcccaaggaactcgacgaggaaggcatcgagaagcagatcgccgacttcgtcaactgcgccagcctggcccaggtcgccggctacgacggcgtcgagatcatgggatcggaaggctacttcatcaaccagttcctcgtgcagcacaccaaccagcgcaccgaccgctggggcggcagctacgagaaccgcatgcgcctgccggtggagatcgtccgccgggtgcgcgaggcggtggggccgaacttcatcatcatctatcgcctgtcgatgctcgacctggtcgagggcggcagcagctgggacgagatcgtgctgctggcgaaggccgtcgagaaggccggcgcgaccctgatcaataccggcatcggctggcacgaggcgcgcatcccgaccatcgccaccaaggtgccgcgcgcggccttcaccaaggtcaccgccaagctgcgcggcgaggtcggcatcccgctgatcaccaccaaccgcatcaacactcccgaggtggcggagaaggtcctggccgagggcgatgccgacatggtctccatggcccggccgttcctcgccgaccccgatttcgtcaacaaggccgccgccggccacgccgaacggatcaacacctgtatcggctgcaaccaggcctgcctcgaccacaccttcggcggcaagctgaccagttgcctggtcaacccgcgcgcctgccacgaaaccgagctgaactacatccccaccaccaggccgaagaagatcgccgtggtcggcgccggcccggccggcctggccgccgccaccgtggccgccgagcgtgggcaccgggtcagcctgttcgacgccgccggcgagatcggcgggcagttcaacgtggccaagcgggttcccggcaaggaagagttccacgagaccctgcgctacttccgcaacaagctggagagcaccggtgtcgaactgcacctgaaccgccgggtcggcgtggacgacctggtcgcgggcggctacgacgagatcgtcctcgccaccggcatcgttccgcgcacaccggcgatccccggcatcgagcatccgaaggtgatcagctacctggatgcgatcctcgagcgcaagccggtgggtggcaaggtggcggtgatcggcgccggcggcatcggcttcgacgtctccgaattcatcacccatgccggtccgtccaccagcctggagcgcgaggcgttctggaagcagtgggggatcgatactcgcctggaagcccgcggcggcatcgccgggatcaaggccgaggtgcatccggcggcgcgccaggtgttcctcctgcaacgcaagaagagcaaggtcggcgacggcctcggcaagaccaccggctggatccatcgcgccggcctgaagaacaagcaggtgcagatggtgaatgccgtggagtatctcgggatcgacgacgccggcctgcatatccgcgttgccgagggcgagccgcaggtgctgccggtggataccgtgatcgtctgcgccggccaggacccgctgcgcgagttgcaggacggcctgctggcggccggccagagcgtgcacctgatcggtggcgccgacgtcgccgccgagctggatgccaagcgcgccatcaaccagggttcgcgcctggccgccgaactctgagagcctttccgcgatctgttgcgtagcggagaaactgcgttgaaaacggcttttctccagctcgcacaggttctgcgtatcgcccctgtccgccctcgtcggcgcggcggggcgctgcgcaccggttcggtgaacggtggcgctctgccacggtgatctccgtccgctcaaaacccgaccgcttcacaatttcccctaccgctcggcgggccgtccggcatcgcccgggtgtctgccaacccagtcacattgcccgcgacattttttcccctagacttgcccgaacaacgagatagcgcctgtttttcaggtgacatgccagatgggtactgccggatgcgggccgcctcgccaggcgttcgagggttagcgatgagcatgcagaaaaagccacagatggcggaggccgtgctgttcttcaacgacagcggcgtctgcaaggaaatgctgtatcccgaattcgaggcgctgctcgatggcctggtgcgcatgccggaatacgccgaccggcagatgcacctggcctatgtgttgatcaatccgcgcctgcaggcgcgggcggcggtgttcttctatctcgatttcgacgagcagggcggcgccgacaccggctggaacctgcctctgcgcaacctcgccgaacgcgccggacgcggccccgacatgggcggcgggccgatccgcctggcctgtcgcagccagtgcccggtgtcctggcaccagatgcacctctgggacccggagagcagcgccggacgcaaccatttcgtgctcatccgcgacgcgctcaggcgcaaccagctgggcctgctggtggacgaagagcctgccgcggtggagccgcagcggctgcagatggccgccgaagagcaatggtacgccgccggtcccgccgccccgaaggcatcgcccgcggagcctccgcgcaagcaggaggacgagcagacggcgcgcctggcgcaactggtcaagcagcagcgacaacagctcgccgccctggcccggcagcaggagcagcgcctggccgggctcgcccggcagcacgaagaggaactggccaggcgcgaacaggacgcccgcgggcaactggacatcctgcgcagcgaagtgctcagcctgcaacaggccctggaacggcaggcgcgggagaacgccgaattgcagcagcgtctgctggagcagggcgagcagttccagcgcaaccgcgaggaactgacccggcaactgcgtttcatcgagaaccaggggcgcaacgagaccgacctgctgcgctcggagttcgccgacgaactggaggctcgggtggcggcggcggtggccggctacaaggagcaggtctcgatccgcgacgtcgaactggcctaccgcaacgagctggaccagcaactggagcaggaactggccgagctgcgcgccgagcgcgaccgtctggccgcccagggaccggagcaactgctggagcgtctatccggccagggcgtggtattcgtcgcctaccatcccggtgccgggcacctgaccatccccttgcaggacatcccgcgttaccaggacaatccgctggcctacgcggcggccaagtgcttcgtctccgagagccagtaccgccagtggctggaccacttccagcagccgcgctgcgaggcgctgctgcccggcggcgaacgctgcaacctgccgctcgaccgggtcgacaacccggcgcgcttcgtcgccggcgacaccaactgctgcgcccggcacaagaccacggggcgtctgcgcaccgtgagctgactccttgccgtttccccactggtcaccgcatacacccttgcagcgtctcgaactcgactggctgcaacgggccggggtcgaactggcgctgctgcgcctggaccaggccgatccgctgatctccggcaacaaggggttcaagctcgcgccacacctggcgctggcccgtgagcaggggctggacggcctgatcagcctcggcggcgcccattccaaccacctgcacgcgctggccggcgctggcgcgcgtttcggtttccgttgcgtcggcctgttgcgcggacacgaagtcgatacgccgacggtgcgcgacctgcgcagtctcggcatggaactgcactggctcggctacggcggctatcgccagcggcatgccgccggcttctggcttccctggcgggaacgttacccaggcttgctgccggtcgccgagggcggtggcgggctgctgggcgcgcgcggttgcatcgggctggtggagcgcatagcgacccagttgccgacgctcggctgggacgattacgacgcgatctgggtggccgccggtaccggtacgacactggccggcctggtgctcggcgaggccgggcggcatcccgtggtgggcgcgctggcggtgccggaggaccacggcgtcgccgcccaggtcgcggcgacccttgccgaggcgggctgggccgatgccggctatcgcctgctggacgccagccgtggcggtttcgcccgcctcgatgggcgattggcgcggttcatcgtcgagttcgagacggccagcggcgtcgccctcgaaccgctgtacaccggcaagctactgctcgccctgcgcgaggccgtggagagcggcgcggtggctcgcggcagccggctggtggcgctgcacagcggaggcctgcagggccgccgggcattgcaggagcgtttgctggcgttgctctgatcaggcatccgcggcctggcgcgcgctaccccacaggctgagccccggcggccagtcgtcgctggccaggaacaggcgctcggcctctacccagtagccgtcgcgcggcaccacccttaccagcatttgcggacgtgcctcgtcggcgaaggcgatgttccagcaggcgccgtcgcgcggagggtcgagcgggtcctgccgccgcatggccggcgccagccagtgctcgcgcgtcagatgcagccaatgctgcccggcctgcggtccggccaggctggccaggtacgccggccagtcgcgctggcggagccagcggccacgcagatgccgtggctcgatgtcggcgggcaggctgcccggcccgggccagggatggaacaggtagccgctcagccataatgcggaaacggccgattcggcgccatgggcggccaacacctggcgaccctcgcgggtcgccgccagcggcaactggtgtcggcagaggtgttccagcttgcgtgacaggcggtcctggccgccgggcccgagccagtcgccggggccggactggggccccaggtagagtttgatcgccagttccaggtggtggatgccgtcgtcgtcccgcagcagcaggtcgagttcgccaagggtatgcccgccgtcgcgcaccggcaggttggcggcgatcaggcgcacgtccggggcttgttccagggcgaattgccagagatgttcgtagtacaggccgagacgctgccgtggccactgcgcgagccaggcggcgaggtgctgcggctgtcgctcctgttcgcgcaaccaggcggccaggcgctccggctcctggcgccagcggctggcggcgagcggatggcgctgcggctccggggtccggcgcagcaacggcggggcgagcagggtccaggccaggtcgcggacggccgggtggcgcaattcgtcgagcaattcggtcagcagcgtcatacccagaggttagccgggttgcgccactcgcggcgatttcccgtacatgcgcgggtttgccgctgtccgcggctttcgcccataatccgctctatcccgcccgccagcttttcgcaggaaccgcatggaaccctttcgcaatatcggcatcatcggccgcctcggcagcacccaggtgctggacaccatccgccggctgaagaaattcctgatcgatcgccacctgcatgtgatcctcgaggacaccatcgccgaagtcctgcccggacacggcctgcagacctgctcgcggaagatcatgggcgagatctgcgacctggtggtggtggtcggcggcgatggcagcatgctcggcgcggcccgcgcgctggcccggcacaaggtgccggtgctggggatcaaccgcggtagcctgggcttcctcaccgacatccgcccggatgaactggaggccaaggtcggcgaggtgctggacggccagtacatcgtcgagagccgcttcctcctcgatgcccaggtgcgtcgcggtatcgactcgatggggcagggcgatgcgctcaacgacgtggtcctgcacccgggcaagtcgacccggatgatcgagttcgagctgtatatcgacggccagttcgtctgcagccagaaggccgacggcctgatcgtcgccacgcccaccggttccaccgcctacgcgctgtccgccggtggtccgatcatgcatccgaagctggatgccatcgtcatcgtgccgatgtacccgcacatgctttccagccgcccgatcgtggtggacggcaacagcgagctgaagatcgtcgtgtcgccgaacatgcagatctacccgcaggtctcctgcgacgggcagaaccatttcacctgcgcccccggcgataccgtgacgatcagcaagaagccgcagaagctgcgcctgatccaccccatcgaccacaactactacgagatctgccggaccaagctcggctggggcagccgcctgggcggaggcgactgatgcaactcgaccccggacgtggctacgacctgatcggcgatgtccacggctgcgcgcataccctggaccgcctcctcgacctgctcggctaccgcctgcagggcggcgtctggcgccatccgcggcgccaggcgctgttcctcggcgacatcgtcgaccgcggcccgcgcatccgcgaggccctgcaccgggtgcacgcgatggtcgacgccggcgaggcgctgtgcatcatgggcaaccacgaattcaacgcgctcggctggagcaccccggcggcgcccggcagcggccgccagtacgtccgcgagcatacgccgcggcatgcccggctgatcaaggagaccctcgagcagttcgagggccacgacgccgactggcgcgacttcctcggctggttccagcaactgccgctgttcctcgatgccgggcgcttccgcatggtccatgcctgctgggacggcgagctgatcgcgaccctgcgccggcagttccccgacgggcggatcagcgaggtcttcctgcaggagtcggcggagcccggcagcttcgccgacctggcctgcaaccgcctgctgcgcggtaccgacatgcgcctgccgcacggtgccacgctgaccagcagcgatggctatacgcgcgccttcttccgcaccaagttctgggtcgaggacgaggcgccgcgcacctacggcgatatcgtcttccagcccgacgcgttgcccgaagcgatcgcccgcgagccgctcagcgaggagcagaagtccagcctgctgacctacggcgccgacgaaccgctgttgttcgtcggccactactggcgacgcggcacgccggcgccgatccggccgaacctggcctgcctggactacagcgcggtgatgtacggcaagctggcggcctaccgcctggatgaggaaacccgcctggaccggcacaagttcgtctgggtcgaagtgaagcggccggaggctgacgagtgagcgcggtgcaggtcctgaagtttcccctgtcggtcgacctggccggcttcgtcggcctgctgcggcgtctgaacgtgccgcaccgggtcagcgaggaatccggccagcaggtcctctgggtgcccgacgagcggctcgccgagcaggtccgcgagttgtaccggcgttatcccgaaggcgatccgcaggcgaccctggaggccgcgccgcgaccggcggggcaggggttcgtccggcaactgcggatgagcccgatgaccgccgcggtgttgctgctgaccttcgtcgtcgccgccgtcacctaccttggcgacaacttcgcgacgatgcgctggctgaccttccaggactttcgtatccagggccagtacgcgctgttcacgccgttggccgagagcctggcggcgggtcaatggtggcggctgttcacgccgatgctgatccacttcggctggctgcacctggcgatgaacgccatgtggttctgggagctgggccggcgcatcgaattccgccagggcggcccgatgctgctcggcctgaccctgctgttcggcctggtgtccaacgtggtgcagtacgcggtgagcggcgccagcctgttcggcgggttgtccggggtgctctatggcctgctcgggcactgctggatcttccagtacctggcgccgaaccaggcctatcgcctgcccaggggcgtcgtggcgatgatgctgatctggctgctggtgtgcctgtccggggtgatcgacctgctcggcttcggctccatcgccaacggcgcgcacgttggcgggctgctggtcggttgcctcagcggtttgctgggcggcctgctggcgcggcgtcgccgttgagcgaggggctgcggcagcttcgatgtgcgccgccggccccggcccggtagaatggccggtacgccttttcaccggagccggccatgtcgtccttcaatcaagcgatcgagaacatcactcctgagatctaccagaacctcaagctggccatcgagatcggcaagtggccggacggccgcaagctgacccaggagcagaaggaactctgcctgcaggcggtgatcgcctgggagctgcagaacctccccgaggaggagcgcaccggctacatgggcccgcagcactgctcctcgcattccgacgagccgatcccgaacatcctgttcaagtcggactccgtgcactgatggaagaaatcgcccgcggcgcgctgagcaagatgacggcgcgcctggaaagcaatgctcccgtgcaatacgccttccgcctcgacgaccgcgaagtcgcggtgaacccgctgatcggccggccgctgcgcctggagtacctcggcagcatcttctgcacccattgcggccgcaagacgaagaagagtttcagccagggctattgctatccctgcttcacccggctggcgcagtgcgacagttgcatcgtcagcccggagaagtgccactacgagcagggcacctgccgcgaaccggagtggggcgagcggttctgcatgaccgatcacgtggtgtacctggccaactcctccggggtgaaggtcggcatcacccgcgccagccagattcccacccgctggatcgaccagggcgcgcgccaggcgctgccgatcctgcgcgtggccacccgccagcagtctggcctggtggaagacctgctgcgcagccaggtcgccgaccgcaccaattggcgggccatgctcaagggcgaagccgagccggtcgatctggcggcagtccgcgagcaattgttcgaccagtgcgccgacggcctgcgcgaattgcagcaacgtttcggcctgcaggcgatccaaccggttatcgacctcgatccgctcgagatcgcctacccggtcgaggcctacccgagcaaggtcgccagcctcgacctggaaaaaacgcctatcgtcgaaggcacgcttcgcggtatcaagggccagtacctgatcctcgacaccggggtgatcaacattcgcaaatacacggcctaccagatcgccgtgcatcactgagcagaagggccacaagccatgcgcaccgagcaaccgaaagtcatccacctcaaggactatcaggcgccggactacctgatcgacgagacccacctgaagttcgaactgttcgaagaccacagcctggtacacgccgagttgaagctgcggcgcaaccccgagcgcggcgccggcctgccgccgctgttgctgcatggccagcaactggagctgctggcgctcgaactggacggccaggcgctcggcgcggacgactaccaactggacgacgagcagctcggggtgcaaccgcggcaggccgaattcgtcctcaggagcacggtgcgtatccatccggagagcaacaccgcgctggaaggcctgtacaagtccggcaagatgttctgcacccagtgcgaggccgagggtttccgcaagatcacctattacctcgaccgtcccgacgtgatgagtcgcttcaccaccaccgtcagcgccgaacagcagcgctacccggtgctgctctccaacggcaacccggtggccagcggttccgaaggcaacggccggcactgggcgacctgggaagacccgttcaagaagccggcctacctgttcgccctggtcgccggcgacctctggtgcgtcgaggacagcttccgcaccatgagccagcgcgacgtggcgctgcgcatctacgtcgagccggagaacatcgacaaggtccagcacgccatggacagcctgaagaagtcgatgcgctgggacgaggaggtctacggccgcgagtacgacctggacatcttcatgatcgtcgcggtcaacgacttcaacatgggcgcgatggagaacaagggcctcaacatcttcaactccagttgcgtcctggcccgcgccgaaaccgccaccgacgccgcccaccagcgggtcgagggcgtggtggcgcatgagtatttccacaactggtcgggtaaccgggtcacctgccgcgactggttccagctgtcgctcaaggagggcttcaccgtattccgtgactcggagttctccgccgacatgaactcgcgcacggtcaagcgcgtcgaggacgtcgccttcctgcgcaccaaccagttcgccgaggacgccgggccgatggcgcatccggtgcgccccgactcgttcatcgagatttccaacttctacaccctgaccgtctacgagaagggctcggaagtggtgcggatgatccacaccctgctcggcgccgaaggcttccgcaagggctcggacctgtacttccagcgccacgacggccaggcggtgacctgcgacgatttcgtcaaggccatggaagacgccaatggcgtcgacctgacccagttcaagcgctggtacagccagtccggcactccgcgcctggcggtggaaggcgagtacgacgccgccgcccgccgctacaccctgacggtgcgccagagctgcccgccgactcccggccagccgagcaaggaacccttcgtcatcccgctggagctgggtctgctcgacggccagggccacgaacttccgctgcgcctggaaggcgaggccgtggcccagggcggcaaccgcgtgctggcggtgaccgaggccgagcagcgcttcgtcttcgtcgaggtgccggagcagccgctgccatcgctgctgcgcggcttctccgcgccggtgaaactgagcttcccctacagccgcgaccagttgctgttcctcatgcagcacgacagcgacggcttcaaccgttgggaggccggccaacagctttcggtgcaggtcctgcaggagctgatcggccagcaccagcgcggcgagcaactggtactcgacccgcgcctgatcgaggcctaccgcaccctcctggcggacgaggcgctggaccaggcgatggtcgccgagatgctctcgctgcccagcgaggcctatctcaccgagatcagcgaagtcgccgatgtcgacgcgatccatgccgcccgcgaattcgcccgccagcgtatcggcgaagcgctgttcgagccgctgtggcagcgttaccaggccaaccgcaagatttcccgcgacaccgcctacctcgccgaggcctcgcacatagcccggcgcagcctgcagaacatcgcgctgtcctacctgtcgctgtcgggccgggaggaaatcctcgccgcctgcctggagcagtacgaaggctgcgacaacatgaccgagcgcctgaccgccctggcggtgctggtcaactccggcttcgaggcggagaagggcaaggccctggccatgttcgccgattacttcaaggatgacccgctggtgatggaccagtggttcagcgtgcaggccggctcgccgctgccgggcgggctggagcgggtccaggcgctgatgcagcacccggccttcaccctgaagaacccgaacaaggtgcgcgcgctgatcggcgcgttcgccaaccagaacctggtcaacttccatcgtcctgacggtgccggctatcgcttcctcgccgaccaggtgatcgtgctcaacgcactcaacccgcagatcgcctcgcgcctgctggtgccgctgacccgctggcgcaagtacgacgaggcgcggcaggcgctgatgcgcggcgagctggaacgcatcctggcctccggcgaattgtccagcgacgtctacgaagtggtgagcaagagcctggcctgatccgccagcttcgcccggaagagggtgttactggccactggctggtaacgccctttgttacttctgggaatcgcttcactgttttccattgatggagtccgcttaatcgtgtttcgcgaacctccctgcgcaggctctgcgaagggacttttcgcgccaccggcgaaattcgcctggcgcgttttgtcggacacttcctgttttctggtcagtgaatgaacagtcatcccgcaggaagtcctgtttttttcgcaatccattgaattgcctggaggattccgttgaattggcatcccggttgcactgcctcgtcgcgcggttccctttcgtcgatgctaggccggtgacgccgcgaccacccataacaaggccgcagagaaacggccgaacggcgaaccgcccgcagtggcggcgcccaacgcatgaccacatggagtgagttcccgatgtacatccccaaccgccagccccggctgcgctccgcgccggcccgggccggcttcgccttcgccgggctgctgccgctgctgggcggccaggcccaggccgtcgaattcagcttcctcgacaacgaggtgtccggttcgctcgacaccaccctgtcctacggcaccctgtggcgggtgcaggggcaggacaagagcaacaatgacatcaacaccaacgacggcaaccgcaacttcgataccggcctggtttccgaggtctacaagatcacctcggacctggaggcgacctggcgcaattatggcgtgttcatccgcggcacggcgttctatgacacccagatcatggacaagcgcaacgactactacagccacaacgatccatcgcagccgagccagagctatccccacgacgaccgtttcaccagccagacccgcgacatcgccgggcacaaggcggaaatcctcgacgcctacgtctacggcagctgggacatcggcaacatgccgctgagcgcgcgcttcggccgccaggtgttcaactggggcgagggcatcttctaccgtggcggggtcaacaccaccaacccggtggacgccgccaagtaccgcctgcccggttccgagctcaaggaagtgctgatgccggtggaagcgctgagcttcaacatcggcctgaccgacaacctgtcgatggaaaccttctaccagtggaactggaaggaaacccgcctcgacccggtcggtaccttcttctccgagaccgacctgttcgccgacggcggcaacaccggctacagcgacttcaccggcaccgcgctggacaccccggtgcccggcttcggcaacgtcatcggcctgtaccaggcgctgggcaacaatccgctgctcagcggcgcgctgaagaacaccggcctctatgccaacggcgtgaccccggcctacggcaacgtgatgaaggtgtcgtccatcggcaaggacatcaacgcgcgcaacgacggccagttcggcgtggccttccgctacatcgccgaggaactgaacagcaccgagttcggcttctacttcgtcaactaccactccaaggagccgaccctgtacgccgacatcggcgactatgccggggccgacctggcggcgctggccaacaccctgcggccgatcgccggcaacctcgccgaagccctggccaacggcctggtgaccgccgacgtgatgggcaacatcaatgcccggcgcgagttcgccgaagacatccgcatgtacggcttcagcttcaacaccacggtgggcgacgcctcggtgttcggcgagctggcctaccggccgaacctgccgatcggcatcgccgccaccaacgacctgatcggcgacctcgcccacggtgcggcggaagccgccaacggcgggcagatcaacgtcggcgggcagatggtcggcctcggcgggcagatccacaactacgagcgggtcgaggcgttcaacacctccctcgggaccatctacaacttcggtccgtcgctgagcttcgactcgttgaccggcgtcgccgagctggcctcggaacacctgcgtggcagcagcctgaagtacaccgcctacgacggcagcacccgctactatgccgggcgcggcaacagctcgtacgtttccggcggcgaccgtggcgaccaggtgaaccgcaacgcctacggctacaccctgctgctcagcggcacctggaacgacgtgttcgccggggtcaacgtgtcgccctacgtggtctacaaggacgacttcgaaggcaactcctaccagaccggcaacttcatcgaaggtcgcaaggcctacaccctggggatcaaggccacctacctgaacagcctggaaggcgaactgcagtacaccgagttctacggcggcgggcagaacaacaacatccgcgaccgcgacaacatcggcctgaccgtgaagtactccttctgaccgaaccgataacgacacgggcgccgcgagcgcccggcacctcacacggagaaccctcatgttgaacaagcacctgctgatcggcgcttccctggcgctggcactgggcagcggcggcgcgctggccggcgtttccgccggcgaggcggcgcaactgaagtcgagcctcaccccgctgggcgcggagaaggccggcaacgccgccggcagcattcccgcctggaccggcggcatcacccaggcgccggccggctacaagccgggccagcaccacccggacccgttcgccgcggacaagccgctgttcaccatcgacaaggccaacctggagcagtacagggaacacctgaccccgggccagctggcgctgttcaagacctacccggacagcttccggatgccggtctaccccagtcgccgttccggttcggcgccgcagtggctgtacgacaacaccttcgccaatgccaccagcgccaggctgctggacggcggcaacgggttcgccgacgcctatggcggggtgccgttcccgattccgaagagcggcgtggaggcgctgtggaaccacgtcgcccgctaccgcggcacctatgtcgtgcgccgcgcttcggaagtcgcggtacagcgcaacggtagctactcgctggtgacctcgcagcaggaagcgctgttcaagtactacctcaagggcggcagcttcgccgacctgaacaacctgatgttctactacctgtcgttcaccaagagcccggcgcgcctggccggcggcgcggtgctggtgcacgagaccctcgaccaggtcaaggagccgcgccaggcctggggctacaacgccggccagcgccgtgtgcggcgtgcgccgaaccttgcctacgacacgccgatcgccgccgccgacggcctgcgcaccgccgacgacaccgacatgttcaacggcgcgccggaccgctatgactggaagctgctgggcaagaaggaaatctacattccctacaacaactacaaggtcagcagccccgaggtgaagtacgaggaactgctcaagccgggccacctcgatccgcaatacacccgctacgagctgcaccgcgtgtgggtggtggaaggtaccctgaagccgggcgcgcggcatatctactccaagcgcaccctgtacctcgacgaggacagctggagcgcggcggtggtcgaccagtacgacggtcgcggcgaactgtggcgggtgtcgatggcctacctgaagaacttctacgacctgccgtacacctggagcgcgctggacgtgtttcacgacctgcaggcgcgtcgctaccacgtgcagaacctggacaacgaggagccgggtaccatcgacttcacccaggcgataccggacgactcctacttcaagccctcggccctgcgccgccgcggcacccgctgatcgctccgctcgccggcgccgaccgcttccctccggggaggagggcggcgccgatcccccgttacagacggcttacacgcttaacaaaagataacgtggcttcaattgtctccgtcgccaaacgctggctatataacgctcaccacgaaccactaataacaacaacggggacggtatccatgcgtgagcccatgacgtggcgcacttcgcccggccaaaccgcggacgcttcgcggcatccggccattccttccagatcgcccctggccagcagggccctgtcgtttctcggggtgctttctcttctgaccttcgccgccaccccggtcctggccgagtcgacgccaaccgccgcgccgccgcaattcgccgtggaatcgccgaaggccgccagcagcctgctgctcagcgtcgcccatgccggcaagcggctggtcgcggtcggcgaccgtgggcatatcctgctctccgacgacgacggcaagacctggacccaggccaaggtgccgacccgccagttgctcacctcggtgttcttcgtcaacgagcgcaagggctgggcggtcgggcacgatgcgcagatcctcgtcagcgacgacgccggcagcacctggaccaggcagttcgaggacctcggccgcgaagcgccgttgctggacatctggttcgccgacgaacagcacggcctggccgtcggtgcctatggcgcgctgctggagacccgcgacggcggccagcactgggaagacgtcagcgagcgcctggacaacgaggaccagttccacctcaacgccatcgccgcggtcaaggacaacggcctgctggtggtcggcgaagccggcagcctgttccgctcgaaggactggggcgccacctgggaaaaactcgaaggcccctacgagggctcgctgttcggcgccatcggtaccgccgatgcgggcggcgtgctggtctacggcctgcgcggccacctgttccgctccgccgatttcggcgacagctgggaagagataccgctgaaggcggcgtccggcgacctggaattcggtctctccgacggcgcgctgctggcggacgggcgtatcgtcgtggtcggccacggcggcagtgtcctcgaaagcaccgacggcgggcgcagcttcagcgtgttcaaccgtcccgaccggctgtccctggccggcgtcagcgccaccggcgacggccacctgatcctggtcggccagggcggcgtgcacctcgctgcggcgaacggtgccgcgctcgaacaacaacaataaggcgggggtcgcatgagtgccatgaaccagcatcagcaaaacaaggcgagcctgctcgaacgcctgatcttcaacaaccggccggtggtgatcttcctctgcctgctggtcagcgtcttcctgttctaccaggccacccaggtgcggccgtccaccagcttcgagaagatgatcccgctggagcacccgttcatccagaaaatgctcgagcaccgcaacgacctggccaacctcggcaacaccgtgcgcatctcggtggaggcggtgaacggcgacatcttcaccaaggagtacatggagacgctccggcagatccatgacgaggtgttctacatccccggcgtcgaccgttccggcctgaagtcgttgtggagccccagcgtgcgctggaccgaagtgaccgaggaaggcttcgccggcggcgaggtgatcccgcagacctacgacggttcgccgcgggcgctggaggaactgcgcaacaacgtgctcaagtccgggcagatcggccgcctggtggcgaacaacttcaagtcgagcatcgtcgacgtaccgctgctggagatgtacccgaacccgaagaaccagagcgaactgatcaagctcgactaccgccagttctcccatgagctggaagagaagatccgcgacaagtaccagttgcagaatcccaacgtgaaggtgcacatcgtcggcttcgcgaagaaggtcggcgacctgatcgacgggctggtgatggtggtcggcttcttcggtatctgcctgctgatcaccctggtcctgctgtactggttcaccaagtgcatccgcagcaccatcgccgtgctgatcaccaccctggtcgcggtgctctggcagctcggcctgctcaacctggtcggtttcggcctcgatccctattcgatgctggtgccgttcctgatcttcgccatcggcatttcccacggcgtgcagaagatcaatggcatcgccttgcagtccagcggcgccgacaatgcgctgatggcggcgcggctgaccttccgccaactgttcctgccggggatgatcgcgatcctcgccgacgccgtcggcttcatcaccctgctggtgatcgacatcggggtgatccgcgagctggccatcggcgcctcgatcggcgtggcggtgatcgtcttcaccaacctgatcctgctgcccgtggcgatctcctacatcggcatcagcaagaaggcggtgcagcgcagcaaggatgacgcggtgcgcgagcacccgttctggcgcctgctgtcgaacttcgccagcccgaaggtggccccggtgtccatcgccatcgccctgctgatgctcggcggcggcctctggtatggcaagcacctgaagatcggcgacctcgaccagggtgcgccggaactgcgtcccgactcgcgctacaacctcgacaacgacttcatcatccgcaactactcgaccagttcggacgtgctggtggtgatggtcaagacctccccggaaggctgctccacccaccaggccctggcggccatggacgagctggcctggaagctggagaacaccgagggcgtgcagtcggcgatctcgatggtcaccgtgtccaagcaggtgatcaaggggatgaacgaaggcaacctgaaatgggagaccctgtcgcgcaaccaggacgtgctgaacaactccatcgcccgtgccgacggtctctacaacaccgactgctcgctggcgccgctgctggtcttcctcaacgaccacaaggccgagaccctcgaccgcgcggttgcggcggtgcaggccttcgccgcggagaacgacaaggacgacctgcagttccagctggccgccggcaacgccgggatcgaggccgccaccaacgaggtgatcaagcagtccgaactgatcatcctggttctggtgtacatctgcgtggcggccatgtgcatgatcaccttccgttccttcgccgcgaccctctgcatcgtcctgccgctgatcctcacctcggttctcggcaacgcgctgatggcggcgctgggcatcggcgtgaaggtcgcgaccctgccggtgatcgccctcggcgtcggcatcggggtggactacgggatctacatctacacccgcctggagtctttcctgcgcatgggcctgccgttgcaggaggcctactacgagaccctccgctccaccggcaaggcggtgctgttcaccggcctgtgcctggcgatcggcgtggccacctggatcttctcggcgatcaagttccaggccgacatgggcctgatgctgaccttcatgctgctctggaacatgttcggcgccctctggctgctgccggccctggcgcgtttcctgatcaacccggccaagctgcaggccaggaaggcctcggtgttcgctcactgagtcgcgccgagccccgccaagaccgcggcccaggccgcggtttttttgtgcggaggaaggccgtcgcgcttcagtccggcgtggcggggaacagcagctcgcagcggaagcgctgctcgtcgctgctgtaatgcaggcgccagccgctcttctggcacaggcgctggaccaggtcgaggcccaggccataaccgaacgccatcgactcctccgtgccctgggccgcgccgatggggttgctgatcagcaggctgcggtcgcgcacgacgatttccaccacgccctcgtcgctgtactgcagggcgttgcgcagcaggttgccgatgatgatccgtgcgcgggtctgcggcaggctgtgtggctccacgtcgaggtggaaggtcaggccgcggcgctggctcagcgcctgctgttcctcgagcagttcctccagcaggcggccgacctcgatgtgtccgtcgtcgcgcagttcgccgctctcgcggctgagccagagcaaggtctcggtcatctgctgcatgcccagcgccgagcggcggatgcgttgcaaggcatgcggggagggcgcgcggccgggttggtcgagcaactccaggttcatgccgatcaccgccagcggggtgcgcagctcatggctggcgtagcgcaggaagcgctcctcgcgctggctgaagtccttgatccgggtcacgctgttccacagggtatccgccagcacgttgagttcgcggtagttgaagcgcggccgctggctgtccggggcgaggtcgtcgagggtcatcgaccagcgcgtcagcttgcgcaacggcgcgacgatgaaccagaccagcaggccgacggcggccagcgaaggcagggtgaccgacagggtgacgatccaggtctgcctgacgcgggcgtcgatgatggcgtcggacagcggcgtgtcgatgctgccggcggcgtcgttgtcgtagaggtagagcgtcttgccgtcggccagtggctggcggaccaccacgtaggcatcgtcgctgggcgcgtcgtcatcctcctcttcgtcatcgtcgtcccagttgccgagcagttgcatggcgccgatgctcttgtagggcggggtgtcgagcatctccctgagtttcggcggcagccccgcggtgccgacgctgcccttgaagtagtagctgtccggcgccggcgtagccgggtcttcctggtagcgctgggcgaagtacagcccttcctcttccatcatcatgctgagcaggtagagggcgccggtctcgccgtagtcgccgagcatgcgcgtgtagaccagcaacaccccggcgaggatcagggtgacgccgccgccgacgatggggataaggctcaggccgcgtttcatttgcgctccagctggaagccgacgctgtgcagggtatggatcagaggggtggcgaaccccttgtcgacggtgctgcgcaggtggtgcatgtgcacgttgagggtgttgctttccggcggctcgtcgccccagacgctgcgccccagctgctcgcgggtgaccagcgcggggctggcgcgcatcaggcactcaaggatcttccaggcggtgggggacagcgccaggggcgtgccgccgcggctggcctggcggctgtcgaggtccatcaccaggtcgtcgacctgcaggcgctgggcctggccgctgcggcgccggctgagggcttgcaggcggaccagcagctccggcagttcgaagggcttgagcaggtagtcgtcggcgccggcgtcgaagccgtcgagcttgtcctgcagggtatccagggcggtgagcatgagtaccggggtctgcaggccggcttcgcgtagctggcgacagacctgccggccgttgatgcgcggcagcatgatgtccagcaggatcacgtcgtagcggttggcgcgcgccaggttgaggccggcctggccgtcgcgggcgtgatcgcagaccaccccggcggcctcgaggtagtcgatgacggtgccggcgagatcgaagttgtcttcgacgacgagtacgtggatatgcatggtatctgttcgcatgacggatgggacgctgtgcctggttcgccgcgggcgttgtccgcgcctacttgagcaccttgatcggcttcaccggggtgccgtcgctccactggcccatgccggtctgctccggcgtagcgcccagggcgtactggcggttgcggttgtagaacgccgcgtcggtgaggccatcgaacagcttccaggtgccgtaccagtcgagggcgtcgatcaccagcgggtcgtggccggtatagcggccttcggcctgctggacttcgaggcgcttctcgacgcggtcgagcaaccagtcgctgtcttcttccttcggatactgcgggccgaataccggcgcggtgggtgccgcgtggttggccagcagcggcggagcgccgtggcgatcgctgcgcagcagcagcaggttcttgtcgctgggcggaatgtgccggctctggcggtagatgcgcttggcgtcggtgcaggccacgtggctgtcctcgtcgccgcagaccgccagcagcagggtgcccttggccagccccgacaggcgttcctgggccacgccgtcccagcgcttgccctggctcttgccgggctcgaccaccatcagcgccttcgccgccggcagcttcaggcgttcgctggcggccgccaggttggcggcgagcagtccgccggcggagtggccgaggtaggcgacctggttcagccgcgggcgcacccccagctcgccggcctgcaggcgcctgagggcgtcgccgagggcgccggcggcattgtcgaggaagtctgcgttgggcgtcttcaggtccggctggtagcgcgggtagaccaccaccatgccgcggcggacgatatggtcgatccaggcgcggtagaggtccggctgcatcacgctccagccgtgcaggaagatcaccagcggagcgttgccggggaccggttgctcgggggtgaacacccagtattcgcgagcgccttcgccgaagtgccactgatgcacgctggcatggcgatagtccgcgccgcccggcccttcggccggctgcgtcggcggcgtgggcgcggtcggcggttcggcggccgtcgcggcgtggcccaggagcaggccgcacaggacgaggtacagggtacggaagcgcatgcgggccctcttgcggaatcggaatgtcgtgccagtcctaaccatagcgccgttcagcgcggatagagcggtggcaggccgccattgtcgaccgctcccgccggcgcttgttccgtggtgggcagggcgcggatcgcccgccacaggtcctcgccctgccaggaatggccgctctcgctgtacagcgcgccgttgaggccatccagggcgtcggacagcggtacgaagcgggccgccatgtcggccagggtatcgggttgctgacgggcccaggcgtccagggcctggcgggtcgcctggggatcgttggccaggcaggcgcggcgcagctcgtcgagcaggctgcggctgctcgggccgttggccgcggcgcggatcaccgccggcagctggcgggcgcgccaccagaggccgaagccgagcagggtggtcagggccagcacggcggtagccagttgccagggccagagcgtcggctccaggcgttcgccgagcggcagcgccgccgccggcggctccgcctcggcctgcggcgcggcggccacttccagggtgcgcggtggcaggctggtgcgctccaggcggtcttcgcgggtgttccaccagaccacttcgagcgccggcaactcgatgcgcccggcctgctcgggcaccagcgcctcgcgctcctcgcgactgccgatgaggccctggtcggtgctctggtcggccagttgcggttggtccgggtagcgccgcaggccttgcacgtcgggcagcggcaacggcggaagctgggtgccggaaagcccctcgaccttcagcagcacgttgcgcgtcagcgattcgccgacctgtgcctgctccggctgcgggctccagctttcgctgatgctcagcgcgcgggccggcatccagggcgcgtcggccggatagtcggcgggcttgggccggacctgcagcgggatgctcggcgaagtcacccgcatctgccggccggggcgcgggccgaaggggttgtagtcgtcgctgccacggtcgaccagggtcgcactgaaggcttgcgcaggaatctccagggtgccgctcttctgcgggaagatcgcgtagcgcacctcgatcacgccgtggcggatgccgttgatctccttctcgtaggtgcgcgcctcgccgagctgttcgaccttcgcgtcgttcatcgccagcggggtcaggctgctgtcgtcgtatagcgacaccgagtggtagatgcgcagggtgaggatcgcctgggcctgcacgtagactgtctcctggtcgacgctggcatcgatgaagaccggcgccagcttgctgctcttggcgcggtcgcgcgcctccagtacgtgcagcctgatcggctgggtgctgctggcgccgaggctgatcggcgggatcgccacgtagccgctctgcttcggcaggagggtgacgatccagcgggtggtggcctgggcccggccgttctgcgtggcgagacggttgacctggcgcgtgccgaggacctcgaagagggcgtccagcgggctcaggtcgggtttgccgaagagggtcgggtcgtccgattccagcgtcagttcgacgctttccccttcggtcaggcgggcgcggtcgacgctggcgctgaagctggcatgggcggaaacgcagaggagcgcgagaagcaggctgcagaacaggcggatcatggcgtggcttcctggcgttgctgctgttggtaccagaacttgcgccgcagcaactcggcgggatcgtcgggaatctgtcgcagccattgctcgagggcctggcgacgttcgtcgtcgagtccgtcgtcggcttcctcgtcgcccgtccgctcgtcctcggcgtcgggctgcggctgcgcttggccgggtgctccggcggtcttctcgccttcgtcttccggcaggctggtcgagggcgccgcggcctgggccttctgcgcatcgacggtcgccgcatcgcgcggcggccgctggctgcttccggatggcgggctctgctggctcgcttcctggcgctgttccttgttctcgccggcctgctgctgcgccgcctgttcctggcgctggcgcagcagttcctcgaccagggccttgttgcgttgcgcggcgaccagttgcggctggcgctccagggcttgttcgtaggcgtcgacggcggcttccagttcgccctggcgggccagggcgttgccacggttgtagtgatcgtcggcctggtcgccctgggcgaaggcctgggcagcggcggcgtagtcgcgggcctggtagagcgacaggcctttccagcggaagtcctcgaagcgcttcgccgcctcgtccgcctggccccgttgcaacaggcgctggccttgctggtccggacgcagccagaggtcttcgaactggaaggccatggccggttgcggcaggctcagcatcaacagcggcaggcagaacagccagccgcgccgtccggcacaggcggccagcaggagcagcggcaggagcagccagtaaccctggtcggcccagcgctgcaggcgcagcagggcgttctcgcggtcttcctccagcgtgccgccgcgggccagcaggccgaggctgtcgaggtcgcggtcgttcggccgcaggcgctggtagccggcgccgatctccgcggcgaagcggcgcagcccgctttcgtcgagcctgggcaggaggatgccgccctggtcgtccttgaggaagctgccatcctcctgctgcaccggagcgcccttcggcgtgccgacgccgagcacggcgaggcgcgccgcccggtgctcaagggcgctgcggatgccctggcgctcgggttcgctcagctcgctggtcagcagcagcaggcggccgcggccctgggcgccctgttccagcaggtcgagggcctggcgcacggcgaggtcggcgcgctggccgggctcgggcatgatcgaaggtttcagggcgtcgagcaggttgcgcgcggtgagctggtcgtccgacagcggcaccagggtatgcgcgctgccggcgtagacgacgatcgcggtctgcgcgtcgttgcgcgtgcgaagcaggtcgagcagcttgcgccgggcctgctccaggcgggtcggcgacaggtcgccggcaagcatcccgggagtcagctggaggatcgccaccagcgggtcgctacgcttcatcgagggctgttccagttgctgccaactgggcccgagcaaggccagcagggccagcagccaggcgatgccgaggcagatccagggcatgcggttctgccgcccggcgccgccgaccagcagccagggctggaaggccgtcggcaacagcaactgccagcgtccggcacgacgctggcgatgcagcagcttccacagcaaccagccaagcagcggcgccagcagcagccagtaggggcgcagccagtgcggccaggcgtccagcaacaggttcatggttgcctcccggaacggcggcgcggccaggtccggttttcccgtggccagagttccagcgccaccagcagcacactcaggccgagggcggcggccagcggccaactgtacagcgccagggccgggcgcgcccgggtagtctgctgggcgaccggttcgaggcggtcgagggtcgcggaaatgctttccagctcggcgctggatcgcgcgcggaagtattcgccgccagtgctctcggcgataccgcgcagggtcggctcgtcgagatcgagccccgggttgaagccgaacaggccgggcacgccgccttgctgcgggtcggcgccgatgccgatggtgtagatcttcacctgttgctcggcggccagttgcgcggcgatctgcggggctatctgtccgccggtgttggcgccgtcggtgatcagcaccagcacccggctttccgcaggccgctggcgcaggcgcttgaccgccaggccgatggcgtcgccgatcgccgtgttcttgccggcgatgccgatctgcgcctcgtccagccagacccgcacggtgtgccggtcgaaggtcagcggcgcctgcaggtaggcctggctgccgaacaggatcaggccgacgcggtcgccacgacggtcttcgatgaagtcgccgaagagtttcttgatcagttccaggcggctgatctcgtcgtcctgccagcgcatgtcgcggtagtccatggaaccggagacatccaccgcgagcagcaggtcgcggccgctggcgggtagcggcagggggtcgccgacccactgcgggcgggccgcggcgagcagcaggaggaaccagagcagggcgaagcgcacctgctgccgccaggccggcaggcgtgcgcgggcacgacgcccggcgaggctttcgagttcgtcgaggaagctcaccttgagcgccgcctcgccgctgtcggcggccggcagcaccagacgcagcagccagggcaacggggcgagggcgaagacccagggccaggcgaactcaaacatgcttgcgaatccaggtggcgacggcggcgtcgaggccgtccacggccttgtcgtcgagggtgcagtcggcgcggtagccgccttccaccaggatcatccagcgggtcaggccggcggccgggcaacggttgtcgaggaacgccagccaggcgcggccgctgagggcgtggctgccgctatctggccagcgcgccctgcagacccgcttgagcaggccgttgatggcttgcagccagggtccggcggaagccctgccgtagggcttggcaagcgccgccagttcggccagggccgcttcgcgcagcggatccagcggcgcttcgccgcgggtggcgatggtgcgccgcggcaggtgccggcgcagtcgccagagcccccagccgagcaacggcagcagggcggccagcagccaccagccgggcgctggcggccaccagccgacgggcaggggggcgatcagcggttccagccggtcgagcggattcatgcgcgataccccggctggtgttgttccagcaggtcccgcaactgctccaccaggtcttcctgggtcgacagcggcagcagcggcacgcccagtcgctgggccagccgctgccagcgcgcgcggcgcgcctcggccagttcgcgataggcctggcgcagctcgtcggcgtgggtgtccagttcgaggtcggcggcgccttcgcggaagcgcagcagtccggcggcgggaagagcatggtcgagcgggtcggacagtggcagcagcaccaggtcggtatggcgtgcgatcaggctgagttgctgctcggcgacgtcattgagtgtgcgctcgtcgcacagtaccaggatcaggctgcccgggcgcagcacttcgcgggcgcggcgcagggccaggccgaacagttcgccaggccgctcggccggcgtctcgcgcagctcgcgattggcccgcaatagctggttgaacagttgcagcaggctgtgcttgctgcgtcgcggcttgatttcgtggcagtcgcggtcgctgaataccaggccgccgatacggtcgttgtgggccagcgccgaccagccgatgaaggccgccgcgcgtgccgccagcaccgccttgaagcacaggccggagccgaagaacaggcgctggctctgttcgaccaggacgaacaccggtcgctcgcgttcctcgtggaacagcttggtgtgcggctcgcgggtgcgcgcggtgacgcgccagtcgatggtccgtacgtcgtcgccgggctggtagatgcgcacctggtcgaagtccacgccgcgtccgcgcaggcgcgagtgatgcaggccgaccagcgggctgcggcggttctgcgaggagaacaggcgcgcttcgtggagccggtggcgcatttccagaagctcgtcgaggcccagttcgacgcccggggcggcgctcagcatggcggcggcctcaggccacggcgaccacgtcgaggatgcgctgcacgacccggtcctggtcgatgccggcggcttccgcctcgaaggtcaggatcaggcgatggcgcagcacgtcgaacagcaccgcctggatgtcctcggggctgacgaagtcgcgtccggccagccaggcgtgggcgcgcgcgcagcggtcgagggcgatggagccgcgcgggctggcgccgtaggagatccattcggcgagttccgcgtcgtgcttggccggggtgcgggtggccatgatcagttgcaccaggtattcctccaccgcgtcggccatgtacaggccgaggatttcctggcgcgcggcgaagatggtttcctgggtcacccggcgctccggccgggcctcgccgttcagtgcctcgccacgcgcctgctggaggatgcggcgttccaccgaggcctccgggtagccgatcttgacgtgcatgaggaagcggtcgagctgggcttccggcaacgggtaggtaccttcctgctcgatcgggttctgtgtcgccatcaccaggaacagctgtggcaggtcgtaggtgctgcggccgaccgaaacctggcgctcggccatggcttcgagcagcgccgactgcaccttggccggggcgcggttgatctcgtcggccagcaccaggtgatggaagatcgggccttgctggaacacgaaggtgccggtctccggacggtagatctcggtgccggtgatgtcggcggggagcaggtcgggagtgaactggatacggtggaactcggcttcgaggccttcggcgaggtccttgatggccttggtcttggccagtcccggcgcgccttccaccagcaggtggccgtcggctagcagcgcgatcagcaggcggtcgacgagtttttcctggccgaggatctggctcgacaggtagcccttcagtccctgcagggcgctcttgtgctgcgtgctttctggctcgttgctcattgtctggactaccggttccaaggcctgctggggtgtcgctcggtggcgcacggcgaggccggcgcgggcgggcggggagaaggctccgctctgcggcggatgacggccccccgatcccgcacatgttagcgcacggcgactgcctagcgtactctccgacgctcgtgccgcgcctattcgtgaacccgcgcgggtatgccggtgaaaagcctccgcctctcgccgtgacctgcctcgcgaagcgcggcggatcgacgcgcccggggaactttgccggcgcacgcgggtcggtttccgcgatgcgaacagcgaatggacagagcgtttgtcaggagcgacattgccgggggttgcccggcgcaagggggagggccgcgcccggcgtgggtggcggcgctgggtcggcgggctgctgttgctgctcggcgcgctcgccagcggatgttcgaacgcgccgcgcaacgccgccggcgaggacaccagccagggttcgatgcgcgccggcgaattcctccagaccgatgccgatcgcatggccaccctggccatgcgcgacaacctgcaaagcctctaccagttgctctggaagctgtacaagcgcaatcccgccgaatggaagaagaccggcctgccgagccaggccgacgccgagctggcgatccgccgggccatcgagcagaaccgcgaactcagcgacctgggcggccgccgcgacatcgccgcgctgtcctattccctcgatccggcgttcaggggcgaccgcgtcggcgccttcatctattccctggccagcatgctgatcaccgcccatggcgggcgtaccgagttctacgtctaccaggggatcgacgcgcagtacgtctacaacgccgcgcgcaacgtcgaggtcgccacctggatgctggctacccgcaaggacgacaagggcgccccgttgctgctttccaacgccctcaccgacgacgccagcaacctcagctacgcccgcgagttcgccaagatcgtcgcgcgcctggacctgctcgccgaggtgctcggcgaacgctaccggcggatcagcgtgaactacgcccagggactgctgttcatgcatttcctgccggtgcagtgagccgatgctcccggggtgaacgaatatgtcgcagcacggtaagtgttttgccttgccggctcgttaagctctgtcggatatgaccggcgggtcgctcgccgaaaagggcggttgccggtcagcctttgctgtgcgcctgcctgcctggattaatgctcagcttctgctgaacttcatggacgcagcgagggtcggtccgaaggtgcgttgctcgcgacctttcccgcgaaccgctcgcctccatgaaataacaagccaagcggagtacaaccatggcgttcttcaccgcggccagcaaagccgatttccagcatcaactgcagacggcactggcgcagcacctcggcgacaaggcgttaccacaagtcacgctgttcgccgaacagttcttcagcctgatctccctcgatgaactgacccagcgtcggctttccgacctggtcggttgcaccctttccgcctggcgcctgctggagcgcttcgaccgcgaccagcccgaagtccgcgtatacaaccccgactacgagaagcacggctggcaatccacccacaccgcggtagaagtgctgcacccggacctgccgttcctggtcgactcggtgcgcatggaactgaaccgccgcggctacagcatccataccctgcagaccaacgtcctcagcgtgcgccgctcggccaagggcgagctgaaggaaatcctgcccaagggtagccagggcaaggacgtcagccaggaatcgctgatgtacctggagatcgaccgttgcgcccacgccggcgaactgcgggcgctggagaaggccatcctggaagtgctcggtgaagtacgcgtgaccgtcgccgacttcgaaccgatgaaggccaaggcccgcgaactgctgacctggcttggcaaggccaagctgaaggtgccggcggaggaactgaaggaagtacgcagctatctcgaatggctgctggacaaccacttcaccttcctcggctacgaggaattcagcgtcgccgacgaggccgacggcgggcgcatggtctacgacgagaaatccttcctcggcctgacccgtctgctgcgtgccggcctgagcaaggatgacctgcacatcgagaactatgccgtcgcctacctgcgcgaaccggtcctgctgtccttcgccaaggctgcccatccgagccgtgtgcaccgcccggcctacccggactacgtgtcgatccgcgagctggacggcaagggccgggtgatccgcgagtgccgcttcatgggcctgttcacctccttggtgtacaacgagagcgtcaacgacatccccttcatccgcggcaaggtcgccgaagtgatgcggcgctccggtttcgacaccaaggcccacctcggcaaggaactggcccaggtgctggaagtactgccgcgcgacgacctgttccagaccccggtggacgagctgttcagcaccgccctggcgatcgtccgcatccaggagcgcaacaagatccgcgtgttcctgcgcaaggacccctacggtcgcttctgctactgcctggcctacgtgccgcgcgacgtgtattccaccgagacgcgcctgaagatccagcaggtcctgatggagcgcctgcaggccagcgactgcgagttctggaccttcttctccgagtcggtgctggcccgcgtgcagttcatcctccgcgtcgacccgaagtcgcgcatcgacatcgacccggcgcgcctggaggaagaagtgatccaggcctgccgttcctggcaggacgactacagcagcctggtggtggaaaacctcggcgaggccaagggcaccaacgtcctggccgacttcccgaaaggcttcccggccggctaccgcgagcgcttcgccccgcacttcgcggtggtcgacctgcagcacctgctcagcctctccgagcagcgcccgctggtgatgagcttctaccagccgctggcgcagggcgagcagcaactgcactgcaagctgtaccacgccgacaccccgctggccctgtccgacgtcctgccgatcctggagaacctcggcctgcgcgtgctcggcgaattcccctaccgcctgcgccaccagaacggccgtgaatactggatccacgacttcgccttcacctacgccgaagggctggacgtggacatccagcagctcaacgagatcctccaggacgccttcgtccacatcgtcagcggcgatgccgagaacgacgccttcaaccgcctggtgctgaccgccaacctgccgtggcgcgacgtcgccctgctgcgtgcctacgcgcgttacctgaagcagatccgcctgggcttcgacctcggctacatcgccagtgcgctgaatgcccacaccgacatcgcccgcgagctggtgcggctgttcaagacccgcttctacctggcgcgcaaactcaccgcggaagacctggaagacaagcaacagaagctggagcaggcgatcctcggtgccctcgacgaagtccaggtgctcaacgaggaccgcatcctgcggcgctacctcgacctgatcaaggcgaccctgcggaccaacttctaccagcccgacggcaacggccagaacaagagctacttcagcttcaagttcaacccgaaggccattccggagctgcccaggccggtgcccaagtacgagatcttcgtctactcgccgcgcgtcgagggcgtgcacctgcgcggcggcaaggtggctcgcggcggcttgcgctggtcggaccgcgaggaagacttccgcaccgaggtgctcggcctggtcaaggcccagcaggtgaagaacgcggtgatcgtgccggtcggcgccaagggcggcttcgtcccgcgccgcctgccgcttggcggtagccgcgacgagatccaggccgaggcgatcgcctgctaccggattttcatttccggcctgctcgatatcaccgacaacctcaaggaaggcgaagtggtgccgccggccaacgtggtccgccacgacgaggacgatccctacctggtggtcgccgcggacaagggcacggcgaccttctccgacatcgccaacggcatcgccgccgagtacggcttctggctcggcgacgccttcgcctcgggcggctccgccggctacgaccacaagggcatggggattaccgccaagggcgcctgggtcagcgtgcaacggcacttccgcgaacgcggcatcgacgtgcagaaggacaacatcagcgtcatcggcatcggcgacatggccggcgacgtgttcggcaacggcctgctgatgtcggacaagctgcaactggtggccgccttcaaccacatgcatatcttcatcgacccgaacccggacgccgccagcagcttcgtcgagcgccagcgcctgttcaacctgccgcgttcgagctgggccgactacgacgccaagctgatctccgccggcggcgggatcttcctgcgcagcgccaagagcatcgccatcaccccggaaatgaaggcgcgcttcgacatccaggccgacaggctggcgcccaccgagctgatccatgcgctgctcaaggcgccggtcgacctgctctggaacggcgggatcggtacctacgtgaagtcgagcaaggaaacccacgccgatgtcggcgacaaggccaacgatggtctgcgcgtcgacggccgcgagctgcgcgcgaaggtggtgggcgagggcggcaacctgggcatgacccaactggcgcgggtcgagttcggcctgcacggcggtgccaacaacaccgacttcatcgacaacgccggtggcgtggactgctccgaccatgaggtcaacatcaagatcctgctcaacgaagtggtgcaggccggcgacatgaccgagaagcagcgcaacgcgctgctggtgaagatgaccgacgcggtcggcgccctggtgctgggcaacaactacaagcagacccaggcgctgtccctggcgcaacgtcgcgcccgcgagcggatcgccgagtacaagcggctgatgggcgacctcgaggcgcgtggcaagctcgatcgcgccctggagttcctgccttccgacgaggagctggcggaacgcatcagtgccggccaggggctgacccgcgccgagctgtcggtgctgatctcctacagcaagatcgacctcaaggaatcgctgctgaaatcgctggtgccggacgatgactacctgacccgcgacatggagaccgccttcccggcattgctggcggagaagttcggcgacgccatgcgccgccatcgcctgaagcgcgagatcgtcagcacgcagatcgccaacgacctggtcaaccacatgggcatcaccttcgtgcagcgcctgaaggagtccaccggtatgagcgcggccaacgtcgccggggcctacgtgatcgtccgcgacgtgttccacctgccgcactggttccgccagatcgagaacctcgactaccaggtgcccgctgatatccaactgaccctgatggacgaactgatgcgcctcggccgccgcgccacccgctggttcctccgcagccgccgcaacgagctggacgcggcgcgcgacgtggcccacttcggcccgcgcatcgccgccctcggcctgaagctcaacgagctgctcgaagggccgacccgcgagctgtggcaggcgcgctaccagacctacgtcgacgccggcgtgccggaactgctggcacgcatggtggccggtaccagccacttgtacacgctgctgccgatcatcgaggcgtccgacgtgaccggccaggacaccgcggaagtggccaaggcctatttcgccgtgggcagcgcgctggacctgacctggtacctgcaacagatcaccaacctgccggtggagaacaactggcaggcgctggcccgcgaggcgttccgcgacgacctcgactggcagcagcgggcgatcaccgtctcggtgttgcagatgcaggacggaccgaaggaggtcgaggctcgcgtcggcctgtggctggaacagcacctgccgctggtcgagcgctggcgggcgatgctggtcgaactgcgtgccgcgtcgggtaccgactacgccatgtacgccgtggccaaccgcgagctgatggacctggcgcagagcagccagcacggtgtctgcatcccctgatgcgaccggactgacggcaagcaagagccccgcctgagtgcggggctctttcattctggcgcggcgaaaacctgcggtgtttgcggtggctgaggcgctgcgcggcgacaaatgtccggcgcccggcgttggcctggaaaggacaacctgactcacagatttaataaatatttagttattagaaaatctattgataggttcatatggatctatgacttctccgcttcgtatgccttggccgggatcctgtcgatcgcataaacccccggcagcccgtacttccttccccgcccggtgagttttccgatgacgtcgcggcggtcacgcgggaggcaagaacaggcaaaaggacactatttcgccatgggtgtgtctaaaaattgacagtttccgcttaaaaaattagcaattagcatatttagtcattagattgacgttaatcgcctgcggctgctttggccgtgcccgcactgtcagggattcgacgttgccatcggaaaccgcatccatgctcccgacctgccgcttcggtcggtatcgaccctgccgcgtaggctgggcatgcggttcagcaagaaaggaatcgccgtgctgcgtctgccgtcccgccgtaacatccttcgacccatcgaacacccgctcgcctggcttgccggcctggcgctggcgctttgtgccggcactgccgcaggggctgccggcgggccatccagcgtggcgttctggtacgccgagcggccgccgctggccgagctttcccagttcgactgggtggtgctcgaagcggcgcacctcaagccggccgatgtcgggtatctgaaagagcagggcagcacgcccttcgcctatctgtcggtcggcgagttcgacggcgacgccgccgccatcgccgacagcggcctggcccggggcaagagcgcggtccgcaaccaagcctggaacagccaggtaatggacctcgccgcgccgagctggcgggcgtacctgctcaagcgcgccgcggagctgcgcaaacagggctacgccggcctgttcctcgataccctggacagcttccagctacaggccgaggagcgccgcgagggccagcgccgggcgctggccagtttcctcgcccagctgcatcgccaggagccgggcctcaagctgtttttcaatcgcggtttcgaagtgctgccggagttgcccggcgtcgcgtcggcggtggccgtggagtcgatccatgccggttgggacgccgctgccgggcaataccgcgaggtgccccaggaggatcgcgattggctgaagggccacctggatgccctgcgcgcccagggcatgcccatcgtcgccatcgactacctgccgccggagcggcgtgacgaggcgcgcacgctcgctgcgcgcctgcgtagcgaaggctacgtgccgttcgtcagcaccccggcgctggactacctgggggtgagcgacgtcgaggtgcaaccgcgacgcatcgcgctgctctacgatccccgcgagggcgacctgaccctgagccccggtcacgtctacctcggcggcctgctcgaatacctcggttatcgggtcgactacctgcccaccgaccagccgctgcccgaacgtccgctgagcggtctctacgccggggtagtcacctggatgaccagtggaccgccgctggccagcgacgccttcgacaactggatcgctgcacgtctcgacgaaaaggtgccggtggcgttcctcgccggcctgcctaccgagaacgacggcctgttgcagcgcctgggtattcgccgactgtcgcagaaactcaaggtcaagccgagcaccgagacccacgaccaggcgctgcttggttccttcgaagcgccgctggtgatccggatccgcgacctgccggcgctcaccgtactcgatccggcgcgggtgaccccggcgctcaagctcaagggcgacggcaaggagtacgtgccggtggcgaccgccgactgggggggcttcgccctggcgccctatgtgctggaggagggtagcgagcaccggcgctggatcctcgatccgttcgccttcctgcgcaaggccttgcgtcttgtgccgctgccgagtcccgacgcgaccaccgagaatggccggcgcatcgccaccgtgcacatcgatggcgacggcttcgtctcccgtgccgaggtgcccggcagtccctatgccggccagcaggtgctggaggacttcatcaagccctatccgttcctcacctcggtctcggtgatcgaaggcgaggtcgggccgaagggcatgtacccgcacctggccagggaactggagccgatcgcccggcgcatcttcgccgacgacaaggtggaggtcgccagccataccttcagccatccgttcttctggcagccgcaactggccgagcagggcgagaacttcgaggcccagtatggctacaagatggctatcccgggctacgacaaggtcgacttcgtacgcgaggtgatcggcgcccgcgactacatcgagcagcgcctgaccaccccgcggaagccggtcaagatgatcttctggtccggcgacgcgctgcccgacgccgccaccatcaagctcgcctacgacgccgggctgatgaacgtcaacggcggcaataccgcgctgacccgggcctttccctcgctgaccggactctacccgctgatccggcccacccgcggcggcgtgcagtactacgcgccgatcatcaacgagaacgtctacaccaatctctggcaggggccgtactacggcttccgcggcgtcatcgataccttcgccctgaccgacagcccgcgccgcctgcgcggcctgcacctgtactaccacttctattcggggaccaagcaggcctcgatccgcaccatgcaccagatctacgcggcgatgcaggcggagcatccgttgtcgctgtggatgagcgactacatcccgcgcctggaaggcctgcatcgcgccagcctggccaagcgtgccgatggcagttggcaactgcgtggcttcgccgccttgcgcacggtgcgcctggacccggcgctgggttggccggacctcggccgctccacgggagtcgcgggcgtgcgcgacctgccccaggggcgctatgtgcacctgagtgcggcgaatgcgcgcctggtcctgcgcgacagccgcgatccgcggccggcgctggaggaggccaacctgccgctgaagcactggcgctaccgcgacgatggccgcgtcgagttcgccttcgccgggcacctgccattacgcctggtggtgcgcgcggcgggcgattgccggctgagtgcggccggcaaggccttcccgggaaaggccggcaacggcctgtggacgttcgagttgccgatggagcaggtgcgcgatggccaactcgtctgccgctgacaagcatccccaggcgcgcctgctgaatccctgggccctgctgccggtcgctctcggggtggcgctggtgctgtggctgaccttcaacagcgaagaagtattcatgcccagcggcgatggcgagcccgacgcggtctcggtgaactacgccgaactgctgttgcaggcgcacccggagaacgacgcgctgcgcctgaccctgatcgacctgctggtcaagctcggcgacttcgagcaggcgcgtcatcacctcgcccgtctgcgcggcaaggaccgcctggcaacgccgttctacgaggtggaactggacatccttggcgccctggccaggcccgagggcatggatgaggagcagacgcgccgattgctggagcgcctgcgcaagatcgagcacgtttcgttgaacgacgccatgctcgaacgacttgcccgtcataccctggccctggacgcgccggacctggcggcgcggacctttgccgaactggccggccgcgacccgcagggccggcagcgctggctggacgaggcggcgcgctggtacctggcttccggcgagccgctgccggcggcggacatccagcggcaattggccgaagcgcaaaccgagccggcgaagcgcctggcctatctgcgccaggccttcgccagcctgctcgctggcgagcgcggcgaacaggcggcgttgttgctggacgagcggctggacgccttgccggaggatgaatcgaccctggcctggctcgcccagggcgtacgcgccgccgaaggcagccagcgctacgacctggccgaacgcttcatccggcgctggcgcgaattgcgccccgaggaccatgaggcgctggccgccgacctgcgtctgaacatggccgccgggcgggtcgagcgggcctgggaggtcggccaggagctgctggccctgcgcccggaggacaggacgctgctggccgatctcgcgcgccttggcgaatggaccggcaacggcccgcgggcgctgggcttttggaagcaactgctggccggcgccgatgacccggccctgcgcgagcatacctggcgcctgtcgctgcagatgttcgatttcgacagcgccatcgagctgctggcgcccatcggtgcgcagcgacagatgaccgacgaggaactcgatgcgctggtctacagccatgaaacccgcggcacgccggaagagggcgaggcatggctgcgcggctacgtgcagcgttatccgaaacagcgcctggcctggcagcgcttgcaacagattctcgaacacacccagcagttgcaggaagagaccggggtctgggcgcggatggcccggcatttcccgctgagtgtcaaggaacgcatgcagtgggcggaaacccactggaacctgttcgatccgcgccaggcctggaaggtcctcgccggcgtggatacccgcgcgatccgcgagccggagttctggcgcctgcgcgcggcgctggcctgggccctggagcaggacgacgatgcccgcgccgcctacgagcgcatgctggccctggacatccgcctgaacagcagcgacgaggaccagttgatcgccctgtaccgggacagcaatccgaagcaggccttgcaggtgcttatcggcagttggcagcgcagccgcgatccgcggcgcctggccagcgccctgcaactggcggagaacctccacgactggccggccctgaagagcctgctggccgaggccgaaggcctgccggaagcgcagggcagcccctattactgggtggccagggcgcggctggcggaacaggaaggccatggcgacgtcgccgagcgtctgtaccgggaagccctggtgcgtttccccggcgagaacctggtgcgcgaacgcctgctctggttctacatcgaccgtggccgtcgcgacagcctggcgcccctgttggcgcagtggcatggcctggcgctgcgggacagcacgctgtggctgccgttcgccagcgccagcctgctgctcgagcgtaacgaccaggcgctggcctggttccgcctgtacctcaagtccaatcccaacgactggctggtgcaggccgcctacgccgacgcactggatgccagcggctacaaggacaaggcactgcgcctgcgccgactactgctccggcggctcgaccgcgaggcggtcagggccaccccggacagcttcgccgcctacctgcgcctgctcgccgtggcccaggggccgctgctcgcccagggcgaggcgcggcgggcctggaatggcgagccggcgatgctgcagctgtggttcgagcagttcctcgaccagctcgccgccaccaaccaggagccgctgaaggatgactggctggcctgggcgcgcggccggggcctgaagatcgggcgcaacgaagagatccaggccgccctgcgcagccagaatcgcgccgccctgcaacgcctgctggagcgcggcgagctggatccggcgcagcgggtcgaggcgctggtgcgtctcggccatggcggcgaagcgctgggcgaggccctgggcgcactgggcgacggccactcgcgcgacaaccgcgagcagctgcggcggcaggcggcggaaatcctcgaacgcactccccagggcctgcaactgggttggaacaagcgcgacttcggcggtctcgacttcaaggggccgacgctgcgcgcggcgcgccacctcggcgacgactggtacgccgatctcgaactgggcagtggccgctatcacggcgatgcgctggatagctcgctcctcggtagcgaacgcaacgccaggctgacgttgcggcgcgaactggccgatggcttcgccgcggcgacgctcgatggcagctggcgcgacgacgaggaccgccacggtctgggggtgctgcgcaattggcggctgagctcgcgcgacgaactggaagcgggcctcgactggcaccgcgagaccgacgagaccggcctgatgcgagccctcggcatgcgcgacagcctacggctcggcggccgccacaccctcagcgggcgcgaccagttgagctggtcgctggcgcacaaccgcttctctacccgccagggcgacgacctcggcaacggcgaggcgctgtccctggaatgggcccacacactgttcttcgacggcccggcctggcaactgcgcggcggcatcgactaccagcgcaatcgcctggagaaccgcgtgccggacgacctgctggcggcccatggcggtgcgctggcgctcgatggcgcgcgcagccaggacctgctgcaggaccgctatggccaggtttacctcggcagcacctggcgccgtggcttccctggcgcgctgaaccgcagccgtccgcaatacacctggatcgtcgacaccctggccggctggcagtggacagagaaggagttcaactacggcatcgatctcggcatcggcatggagctgctgggcgacgacgaactggcgttcaccttcggctaccagtcggctccccagggcggcggcggcgatgccggcggcacgctcggggtgacctacagcacgcgcttcggccgctgaacgcggcccggatacggaattcaacaggaggaacacaacatgcaatccatccgctgcctggctctcgcggccgtcgccctgttcatggcgggctgctccagcttcaccagcgaaagcgctacgccgctggcgcgcggcgcgcagtggggcctggtgccgctgctcaattactcccaggcgccgcaggccggcgagcgtgccgagcagatcctgctcagcgtactggccgaggagggcgtgcggccgcgcctgtacccggcgcagccgcaaggcgacctgcaactggtcgacgaccgcgagcgccagcagcgcgcgctggactgggcacgccagcagaagctggcctacgtggtcaccggcagcgtcgaggagtggcagtacaagaacggcctggacggcgagccggcggtgggcgtcagcctgcaggtgctggagccggcctccgggcgggtgctctggagcaccagcggggcgcgcgccggctggtcccgggaaagcctggcgggcgccgcgcagaaagtcctgcgcgagctggtcggcgacctgcggctcgagtgacggcgatgtccgcgcacaaggatttcgccctcgcaccgcgcgccagcggcagcgtctcctgggtcgagacgctggtcatcagcgcgctcgcgctgggcctgggctggtggttcagcccggacgacccgctgcaggtcaacgccacctttccctgggtgatcctcgcgcccctgttgctgggcatgcgctacggcttcgtccgcgggttggccagcgcggcgctgctggtggcggcgctgttcgcgtttcgcgtccagggcgtcgaggcctatgcccaggtaccggcggccttcatcgtcggcgtgctgctctgcgccatgttggtgggcgagttccgcgacatctgggaacgccgcctggagcgcctggagctggcgaacgagtaccgtcagttgcgcctcgacgaattcacccgcgcccatcacatcctgcgcatctcccacgatcgcctggaacagcgggtcgccggcaacgaccagagcctgcgcagttcgctgctcggtctgcgacaactgctgcgcgagctgccgggcgatgaggcaccgctcgatgcgctggcggaaaccgtgctggcgctgctggcccagtacggttcgctgcgcatcgccggactctaccgggtgcgccacgaccgcaccccggagccgcaacccttggcgacgctcggcgagatgccggcgctggacgccgacgatctgctggtgcgcacctgcctggagcgcggcgaactggtcagcgtgcgccaggaactgctggagcgtggcgagcagcgtgcgcacagcgcgctgcaggtgtgcgtgccgctggtcgacaccgatgggcggatccttgccctgctggcggtggagcagatgccgttcttcgtcttcaacgaacgtaccttcagccagctggcgatcctcgccgggcacatcgccgacttgctgcagagcgaccgtcgcgcactgcaactggccgacatcgacgcccagcgcttctcccagtacctcaagcgctccctgctggacgcccgcgaccatggattgccggcctgcctgtatgccttcgagttgaccgatgcgcgctacggcgaagaggtccagcgtctgcttgaaggcagccagcgtggcctcgacgtgcagttgcgactgcgcaacgacgagggccggcgggtcctgctggtgttgttgccgctgacttccgccgaaggctcccaggggtatctgcagcgcctgaggattctcttcgccgaacgcttcggccaggcccgcgagctggagtcgctgggcgtgcgcatccgccagtacgaactggacgccggcaacgatcggcaggcgctgggacatttccttttcaacgagtgcggcctgaatgatcagcaagtggctgtttagcggcgccttcctgttcgagctgagcagttgggcgagtgtcttcgccgacctgccgttcggccaggcgctggcgctctacctgttcgcccacggcctgggcagcgcgctgctgtgcgtcggcgtatggctgctgctgccgcggcgctacaagttcccgctgccgtggagcccgctgttcctcttcagcctggccttcttcgtgccgctgatcggggcggtcggcgtcgccgcggcggtattcccggcgctatacctgccgcgccagcgtggcgagcaggcctggcaggcgatgggcgtccccgagctgccgttccggccgaaggaaaagcgcctcgacatgatgttcagcgacggcggcctgcaggacgtcctgcgccatgcgccggacccgaaccagcggctcacggcgatcttcgccacccggcggatgcccggcaaggaggcgatcccgatcctcaagctggccctgcgcgaccctgccgacgacgtccgcctgctggcctactcgatgctcgaccagaaggaaagccggatcaaccagcgcatcgaggccgccctcggccgcctcgccggcgccacgccggcgcgacgcggcgcgctgcacggaaccctggcgcgctggtactgggaactggcctacctggggttggcccagggcagcgtgctggagcacatcctcgagcaggcgcgcgagcataccgaccaggcgctgcgcggcgcaccctcggccgacctgcatctgctggccgggcgcatcgccctcgaacaaggccgcctggaggatgccggacgcgccctccaggccgccgaggaggcgggaatcgatagcgcccagctggcgccgttccgcgccgaggtggcgttcttccagcggcgctaccgggacatcccccgacttctcgccggaatgcccgacgacatgctgcaacggccgcccttcgcggccctggcgagatactggacatgaccgaacacaccgctccgacggcgcccgtcgccgatgtctgcctgctgctggagggcacctggccctatgtccgcggcggcgtctccagctgggtcaaccagttgatcctcggtctccccgacctgaccttctcagtgttcttcatcggcggccagaaggatgcctacggcaagcgccactacccgatcccggacaatgtgctgcacatcgaggaacacttcctggaaaccgcctggagttcgccgaacccgcagacgcgacagggcagtagcgagaccgaaaaggcgttgcgcgatctgcaccgtttcttccactacccggagacgccggacgtggaggagggcgacgcgctgctcgacctgctcgccgagggccgcatcggccgcgaggactttctccacagcaaggccagttgggaggcgatcaccgcaggctacgagcgctattgcaccgatccgtccttcgtcaattacttctggaccctgcgctcgatgcaggcgccggtgttcatgctcgccgagacggcccggcggatgccgcgggcgcgcatgctgcactcgatctccaccggctacgccggcctgctgggctgcatcctgcaacgtcgctggggctgccgctacctgctcagcgagcacggcatctacaccaaggagcgcaagatcgacctggcccaggccaactggatcgcggagaaccccgacgagcagctgagtaccggactggatgccgaggtcagctacatccgtcgcttgtggatccgcttcttcgagcgtgtcggcctgctcacctatcgcgccgccaatccgatcgtcgccctctacgaaggcaaccgccagcgccaggtactcgatggcgccgagccacggcgcacccgggtgatccccaacggcatcgacctcgatgcctgggccggcgccctcgaacggcggccgccggggattccgccggtggtcgggctggtcggccgggtagtgccgatcaaggacgtgaagaccttcatccgcgccatgcgcggggtggtcagcgcgatgccggaggcggagggctggatcgtcggtccggaggaggaagatccggactatgccagcgaatgccgcagcctggtggccagcctcggcctgcaggacaaggtgaagttcctcggtttccgtcggatcggcgaggtcctgccgcaactcggcctgatggtcctcacctcgatcagcgaagcgcagccgctggtgatcctcgaagcctgggctgccggcgccccggtggtgagcagcgacgtcggctcctgccgcgaactgatcgaaggcgccgacgccgaagatcgcgccctgggtcgcgccggggaggtggtggcgatcgccgacccgcaggccacttcgcgggcgatcctcgccctgctgcgcaatccgcagcgctggcaggcggcccaggcggtcggcctgcaacgggtcgaacgctactacaccgaggcgctgatgctcggacgttaccgcgggctgtaccgcgaagccacggagattgcatgacatggccggcatcggcttcgaactgcggaagatcctttcccgcgattcctatacggcgaccctgcgcgcctacctctacgccgggctgatcagctccggtccctgggtgctgtcgatcgtcagcgtgatgctgatcggcgtgctgagcctcggcgtggtggtgccggacgtgctggtccggcagttcctgatcacggtgacctacctgatggcgctgtcgctgatcttcaccgggggactgcaactgttcttcacccgcttcatttccgatcgcctgttcgagcgcaagcacgaggcgatcctgcccaacctggtgggcgtgctgttgctggtgacgttggcggcgggcctgctctcggcgatattgctggcgaccctgttcgatgagccgttcgcctaccgcctgctggtgatggccaacttcgtggtgctctgcaacctgtggctggtgatcatcttcctgtcgggaatgaaggcctacaaacgcatcctgctggtgatgttcatcggctacgcgctgatggtcgcctgtgcctacctgctgcgtttcatgcagatggacggcctgctgctggcattgctgatcggccacgccagcctgctgttcgtcttcctctacgacatcctccgcgagtacccggccaggcgcatggtggccttcgacttcctcgaccgccggcaggtcttcgtcagcctgctgctgaccggcctctgctacaacctggggatctggatcgacaagttcatcttctggttcaacccctccacctcggacctggtgatcggcccgctgcgcgcctcgatcctctacgacctgccgatcttcctcgcctacctgtcgatcattcccggcatggcggtgttcctggtgcgcatcgagaccgacttcgccgagtggtacgagcgggtctacgaggcgatccgcggcggagagaccctgcagcacatcggcctgctcaaggagcagatgatcctcgccatccgccagggcctgctggaaatctgcaaggtgcaggggctggcggtggtcctgctgttcctgctggcgccgcaactgctcggctggctgggaatttcccgctattacctgccgctgttctacatcgacctgatcggggtgagcatccaggtagtgttcatggccttgctcaacgtcttcttctacctggacaagcgccgcatcgtcctcgaactctgcgtgctgttcgtgatcgtcaacggcgccctgaccttcgtcagcctgctgctcgggccgagcttcttcggctacggcttcaccctgtcgctgctggtctgcgtgctggtcgggctgtaccgcctgaccaccgcgctggacgacctggagtacgagaccttcatgctcaatcgctgaggggtttcgccggcggcagggtctttcagaaagggccgattcacccggttgaatcggcccctttttttgcttcctcgatgcgtttttgcagcttctgcatatccaccaggcgttgcgtaccgaaggttcgcatcggcaggtcgccgctctctatccaggcgtagagcaggtccggccggtcgctgaggccggtcaggaaggcgaaacgcatcagggttatatagcgggggcactcggcgaaaccctcttgggggagttcttccactttcatcaggcgtcctgcaccatggtccgatgttggaggggaaccctcggtctagagggcttggattcatattgatctactaacagttagtgaatcaatatgcatagggaaccatcagacgcggactacacatggtaaagaatcgacgtttgttcactgctggcaagcgcttgcgcgccctgcgcgagctgatgggcttgagccgtccgcagttcgccgagttggtggggatgacggccaagcgcctggagaacatcgagaacgagctgcagcgcatgcacgacgaggacttcgagaaggtctgcggaaccttcccggagttcagcgactggatcgcctatgaaggcagcatcgagccgcagtcgatcgcctggaaggtcgccgactcggcgcaggcggccgcggtctacctggtggagcgcaacccggtgctgcttgagcagcacggcatcgacatgcaggcctggcgcgaacgccaccgcgagatacgcgaggcgctgctggcggcggaacaggcgccggaggcggagccggcgcccctggaagagccgccggaacccaggcgccaacggaagaggaaaacgcccgcgagcggcaagggcgactgaggcgcatcgcgccagaaacgaagggaagtatctgtacatggtctatgtagtgaggaagcgctgcctgtttcgcgccggcgagcgcctgttcgggttgcgcgggctgacggggttgaaccgaccgcagttttccgaggtggtcggcatggatcccaaacgccttgagaacatcgagagtggccggcagcgcatgcacgacgaggatttcgagaaggtctgcgggaccttcccggagttcagcgactggatcgcctatgaaggcagcatcgaaccgcagtcgatcgcctggaagatcgccgaggccgcccaggaagcggcggtctatctggtggagcgcaaccccgagctgctcgaactccacggtctcgacgtgccggcctggcgcgagaggcatcgggagatcctcaagaaggtgcgcaagcgggagttgtcgccgccacccgaaaaaccaccgaaacccaggcgcaagcgcaagccgagaagcaacctgcccacacccaccgacggtacctgagaccggctccctctccccagccctctcccgcaagcgggagaggcaacggggctcccgaagcccagcggtagggcggataacgcgcagcgttatccgccgtcagccccaggtgggcctcagaacaccactcctaccggatagacgaaggcgttcacgtcgtagaacggcgtgcgctggtagaaccattgcaggcgcgcctgcggatcggcggcgaaggccttgtcctcgcgcaggcgtttgtcgaaggcggccttcagcgccgggtcttccgccagcatcttgcgcgccatcggctccatcacgtattcctccggctcctcggcggccaccagggtggaattgaagaagccccaggaccagaaggaatccggactctgcggttgcagcaggtcgatggccaggacgcccagcggctgggcggtgtcgatcgacagcgagccggccgggaaggtctgcaggcgctggaacggcttcggcgtgccgctgaccagcaggcgaccttcgtagcccggaatccggttgccttgcacgcgatccggttcgaagccatcggcgagcttgatgtcgtccatgcggtacagggtcacggcgatttcggtcggacgctcgagggtgctatagcggatgccatgggccttgatccgggcgatcacctcgtgccactgcgccgggacgatgaaacgctggggacgcggcaccaccaggtcgggtacgccgttgtcggtcaccggtagcttcagcgtcttcggccggttgctccagacgatggtgcgggccccggtgaccggcgattgctcgtagcggtagtcgccgaccacgaacggcgtctcggcggcctcgcccggcttccaggtgaggatcacctccttctgccgcagcaggcgctcgcggtcgctggcgatggcctggcgcaggctggcggcctgctcgccgatcacctcgaacatcgccttgagcatcacgtagttgcccagcacctgggtcttgtacggatgcagggcgtgttgctcgatgaggatcgacggcacgttgcggatgtcgccgtactggttggagaagcgcgccaggtcggtgcggtaggggtagtagccctgggtcggatcctggttgtcgttcaggctgatgcattcatggaccatgtgcccgaggctttccagcgcctggtacaccggcttgcgcatgacctggtccatccaggcgctgctcgccggtgaccagccgttgccgttgtggcagtaggagctgtcgtagggatacatggcgccgtcggtggagtgggtgtcggcgaagaagctcagctcgtagtggttgaacacccaggcgacgttgcggatctccgcgctgtcgagcttggtgaagtcgcggttgagattgagattgcggccgttcacccgccagccggtctcctgcgggccgttctggttgatccgcccgtaggcgctgcggcgcaggtcgccgtcgacgttgaccaccgggatgaacagcaggttgatcttctccagcagcccggcgagcgggcggtcggcagcgctcatgtcgcgcagcagcatgaacatggcgtccttgccgttggcctcgccgggatggatctcggcttccaccagcaaggtcggcttggcggagcgcttcaggccggcggcggacttgtcggcctcggtggaggcggtcaccagcagcatcgggtgaccctcggcgctgcgctcgggcaactcgcgcagggcgatgcggccggaggaggcggctaccagtttctccaggtaggcgcgggtctcgcggtagtcgctggtgcgctggaagtcgctgctctcggcctgggtgatcaaggggtcgccgggcttggcgaggtagcgcaggctgcccagcctctgctcgaacatcggtggcaggatgcgctggcgggccgcggccgggtaggcgctgtcatcgatgtaggcgggcgcgtggggcagctccgcgtgagcgggcagggcgctcgccagcaggacgccggcgagtagcgaacggggtaggcaagggaacacgatgaacctccatgtggacgggaacggccgcggcgtgggcgggcctgcgcgacgcgagccacgcgtcgtcgcgcagccagtgcagtgaaacgccggcggcaggcatcggtcttgacgccgggcaaggcgcggcgaagccgatggcgagagcgccgccggtggatggttcagggctgggtttgcagaccctccagcagtgcctggtggaagcgttccggagcctgtatctgcggggtatggccaaggtcggggaattccaccagggtcgcctggggaatccgtcgggcggcgtccttgcccagttgcgcgtagttgcccagcctggctttcagttccgccggcgcggcgtccttgccgatggcggtgttgtctttctcgccgatcagcagcagggtcggcatctgcaaccggtccagttcgtagaccaccggctgggtgaagatcatgtcgtaggtcagcgccgagttccaggccaccgactcgcgccccttgccgcgatacatgccggcctgcatctgtacccagcgatcgaactcggggcgccattcgccggcgtagtaggtggcttgctggtattggcgaatgccttcggcgctggtctgcaagtcgcgcctgtaccagtcgtcgacgctgcgccagggcacgcccagggccttccagtcctccagaccgatggggttgaccagcaccagtcgttcgacctgccgcggatagagcagggcgtagcgggtagcgagcatgccgcccatggagtggccgatcacgctggcccgggcgacgccgagccgttccagcagggcgtgggtgttggctgccagttgctggaagctgtactggtaatgggccggcttgctcgacttgcagaaaccgacctggtcgacggcgatcacccggtagccggcgtcggcgagcacgtcgatggtgcgctcccaggtcccggcgcagaaattcttgccgtgcatgagcaggatggtgcggccgttggctttcttcggcgcgacgtcgaggtaggccatgctcagcggctggccctgggaggtgaagtccagataatgcaccggataggcgtagtcgaagccttccaggcgttcgccgtagaccggcgcctggctggccagcgccggcccgcaggcgagggcgagacagaggctgaggcggggtagggacatgcgatcgctcctgtgtgggtctgctggaggatgcacgtcagggcgcgagctggccagtcctggccggttgcctacagttgcttcagatacttcaccacgtctgccgcgccagccgcccgcagaccttcgccgagggcatcggcgcgttcgtcgttgcggggcagcaacaggcattccggggtttccggggtgaacagggcgagtcgcgcatagggcaggccggtatccagcagcaggctcatgaaggtaggctcggaccaggcctcggtcggaatccgcagcatgtggtagcgccgttccagttcgtccagcgcgccgggctccagttcgtagcgttccaggtgtgccggcagcttcagttccagttcgcggcggcgggcgtagacgatcgccgcggcgaaggcgcaggcctggcgttcgcccgcccagaacagacgctcgccgtgccaggcggcctggcgcaggcggatgctgtcgccgttggtgaaacgcggcagggccaggctcagggccttgacgaaatccttgtagctgatgatccgtacgccccggcagacctcggccgtggccaggtcttccaggcgtgggcaaggtgcctggacgaggatctcccggctgcatacgccttcgatggtcttcaggtcgaccgactccagggtggagtggctgacccgcaccaggcgcttgaggaccgcgtgggcttccgccttgtcttcctggaccgggccggacagcgcgccgcgcggcaggtcgaccagggtgtgcaggggcggtccggcctgccaccagacgctcggctccggccgtcgcaatggctggaacggcagctcgagggcggccgcccgttcgcgcagctcccggccatcgcttcgcgcggcacccaggcgcaggcggttggcgagtgcggaaaggcggccggtgaaggtgctgttgctacgcgagttggaactcatgatcgacggagggctcctcgggctcggcgaccgacgcggaaaggggtgggaggggacggcgacggtccgtccattgaagcacaggttcgggcgtgacattcaaccgcgtggtttgtggcaagctgtcgtggttcattcaagcggggggctccatgcccagtctcatcatggatatcgccctgtccggcgaacgcctgcaggccatctacggcggcagggccaatcgggtcctgctgcgcagccgcgacggtcgccgggtgaacctgccggcccatcacctgcgtccgttcatcggccacgatggcgtgcatggcacgttccgcctcgatttcagcgaggatggccgcctgctggcgctgcaacgcctcgcctgagcgggcgctcgacggctataattggcacccttcattctgccgaccgatacccgaccatgtacaccctggcccgccagctgctgttcaaactgtccccggaaacctcccacgaactgtccatcgacctgatcggggccggcggccgcctgggcctgaaccgcctgctgacgcccaagccggccagtctgccggtctctgtgctgggcctggagtttcccaacccggtggggctggccgcgggcctggacaagaacggcgacgccatcgacgggttcggccagctcggtttcggcttcatcgagatcggcaccgtcactccgcgaccgcagccgggcaatcccaggccgcgcctgttccgcctgccgcaagccaacgcgatcatcaatcgcatgggtttcaacaaccacggcgtcgaccacctgctggcacgggtgcgcgcggcgaagtatcgcggcgtactggggatcaacatcggcaagaacttcgataccccggtggagcgcgcggtcgacgactacctgatctgcctggacaaggtctacgccgacgccagctacgtcaccgtcaacgtcagctcgccgaacacgcccggcctgcgcagcctgcagttcggcgattcgctcaagcaactgctggaggcactgcgccagcgccaggaagcgctggcgctgcggcatggccggcgggtaccgctggcgatcaagatcgccccggacatgaccgacgaagagaccgcgctggtcgccgcggcgctggtcgaggcggggatggacgcggtgatcgcgaccaataccactctcggccgcgaaggcgtggaaggcctgccgcatggcgacgaggcgggtggcctgtccggcgcgccggtgcgggagaagagcacgcacacggtgaaggtgctggccggcgagctgggcggacggctgccgatcatcgccgccggcggtatcaccgagggcgcgcacgcggcggagaagatcgccgccggggcgagcctggtgcagatctattcgggtttcatctacaagggaccggcgttgatccgcgaagcggtggatgccatcgccgctttgccgcggcggaattgaaaagggctccttgcggagcccttgggcttgcgcccgccgcccggatggggcgtgccttggggaaatcggtgctatccgtgttgtcgcttacacgtgctggagttgattgagacgttgtaagccggccgtgccagtgaggccgtcccagttgtcgccacggccctcgcgccagccgttgagccaggactgccgcgtcgtaggatgggtgaacggacaaagatcacgagatttaccggttatgccgttctgataaccacgcaagaaggctctttccaacggatcacgcttaagtcttctcatagggtgttgccctcacttgttgactgttatgtcccgttggcccccaggggaggcctggcgaagctttcgccgaaaggggtcgttgccggcgtgacgaccctcgcccgacaccgttgcggtggcggattaactggagttctaaccaaagcgttcaggcgtgtgaatgaccgatttgtcataaagacttaacgctttcgtcgatagggccatatgttgcaggctcatgacgcctggtttccggcgctaacgccgtagggtcgcggggttgcgccttataacgttttgcacccccaccaattgagatttcctcgcattccgacgaagggtcgcccagactgcgactcggggtcgcagcgagcaacgccgggagcgttccggcaatcgaaccacggcacctggtgccaaagaagtgcccatgagggtgcttccactgacaagggctacggcccgggaaggcgatatggctgatgtttacgaattgtttctgacctgcccgaaaggcctggaaagcctgctcctcgaagaggcgcaggggctcggcctggacgaggcgcgcgcccaggtgtcggcggtgcgcggacagggcagcctggaggtggcctatcgcctctgcctgtggtcgcgcctggccaaccgggtcttgctggtgctggcgcgattcccggtggagaacgccgagtccatgtacatggcggtccacgcggtgaactgggaagaccacctggacgccggcggcacgctggcggtggagttcagcggcaagggctcgggcatcgacaacacccatttcggggcgctgaaggtcaaggatgcgatcgtcgacaacctgcgcgagcgctccggccgacgcccgtcggtggacaaggtcaatccggacgtgcgcgtccacctgcaccttgaccgcggccaggcgaccctctccctggacctctccgggcatagcctgcaccagcgcggctatcgtctgcagcagggcgccgcgccgctgaaggagaacctggcggcggcggtgttgatccgtgccggctggccgaagatcgccgccgagggcggtgccctggccgacccgatgtgcggcgtcggcaccttcctggtcgaggcggcgctgatggctgccgatatcgcgccgaacctcaggcgcgagcgctggggcttcagcaattggctgggtcacgtgccggcgctgtggcgcaagctccacgaggaagcccagcagcgctcggcgaccggcctggccaggccgccgttgtggattcgcggctacgaggccgacccgcgcctgatccagccggcgcgcaacaatatcgagcgtgccggagtggccgactgggtgaagatctaccagggcgaactggcgactttcgagccgcgcccggacaagggccagaccggcctggtgatctgcaacccgccctatggcgagcgtctcggcgacgaagccagcctgctgtatctctaccagaacctcggcgagcgcctgcgccagagctgcatcggctggagcgccggggtgtttaccggggcgccggaactgggcaagcgcatgggcatccgcagccataagcaatacgcgttctggaacggcgcgctggcctgcaagctgctgatgatccaggtcgagccgcgccagttcgtcaccggcgagcgtggcgaacgcaacgacgaaggcctggcgcgggcgccgagcgagccggcacggctgagcgagggcgggcagatgttcgccaatcgcctgcagaagaacctccggcaactgggcaaatgggcgcgccgcgacaagatcgagtgctatcgcctgtatgacgccgacatgccggagtatgccctggcggtggatatctacggcgattgggttcacgtccaggagtacgccgcgcccaagtcgatcgatccggcaaaagcccaggcgcgcctgttcgacgccctggcggcgattccgcagaccctgggcgttgcccaggagcgagtggtggtcaagcgccgcgagcgccaggccggcaagaagcagtacgaacggcagagcagcgagggcaagttcctcgaggtgggtgagggcgatgtgcgcctgctggtgaacctgaccgattacctggataccgggctgttcctcgatcaccggccgatgcgcctgcgcatccagaaggaggcggccggtaagcgcttcctcaacctgttctgctataccgccacggccaccgtacatgcggccaggggcggcgcgcgcagcaccaccagcgtcgacctgtcgaagacctacctggactgggcgcgccgcaacctgtcgctcaacggcttttccgacaagcagcgcctggtgcacggcgacgtgatggagtggttgcgggaagacgatggccagtacgaactgatcttcatcgacccgccgaccttctccaactccaagcgcatggaaggcgtgttcgacgtgcagcgcgaccacgtcgaactgctcgacctggccatggcgcggctggcgccgggcggggtgctgtatttctccaacaacttccgcaagttcgaactggacgagagcgtgcaggcccgctatgcggtcgaagagatcactggcgaaaccctcgatccggatttcgcgcgtaatccgaagatccatcgggcctggagaatcaccgttcgctgaggcgagcggcattcatgcaaaaggtcgccggcgggcaaccgctggcggcctttttttcgtactgcgccttatttccgcgcgtgcaggctcagcagtacctggtcgaggatcgccgaagcgccccacggccgcgggctgttgaggatcgccaccaccacccagttgtggccgctggcgtcgcggctgaagccggcgagggcgcgcacggtgttgagggtgccggtcttcacgtgcgcctcgccgaccagtgcggtgcgccgcaggcgtttgcgcatggtgccgtcgaggccggccagcggcagcgaggagatgtactccgctgcataggggctgtgccaggcggcttgcagcatcgccgccatctcacgggcgctgacccgttcctggcgcgacagtcccgagccgttctccatcaccaggcgcggcgcggtgatgcccttgcgcgccagccactgccgcaccacccgctgcgcggcctgggcgtcgtcgccgtcggcgctgttgcggaactgcgcgccgatggagaggaacaactgtcgggccatggtgttgttactgtatttgttgatgtcgcggatgatctcgaccaggtctggcgagaaggccttggcgatcagcgtggcgttgcgcggtacgctgccctggcggtccttgccgaggatgctgccgcccagttcctgccagatgccgcgcaccgcgccggcggtgtagccggggtggtcgagcagcgacatgtaggtctgcgcgctacagccctggggaatctgtccggtggccagcagggtggtgccgtcgaactgggtcaccgggctgaagcgcagcttcggccaggctgggcaggtggccggcgcggtcatcttcacctggttgtcgatgcgtacgttggccagcggcgggtccatctgcacgttgaccttgttgccgtcggtgcgcaccaccatgcgcacgctcttcaggttgaccagcagcgagtccggaccgaccaggaacggcttggtgtcgtcgccgccgtcgtcgttgaataccggcaactgcgggatgttgaagtagctgcggtcgagtaccaggtcacctgtgaccttggtcacgccattggcgcgcaggtcgcgcatcagcagccagagcttctccatgttcagtttcggatcgccgccgcccttgaggtagaggttgccgttgagcactccgttcttgagctggccgtcggtgtagaactcggtcttccactggtaggtcgggccgagcatttccagggcggcataggtggtgaacagcttcatggtcgaggccgggttcaccgatacgtcggcgttgtagtaggtggggttgcccgggccgtcgagcggaatcagcaccagcgacagatcgttgccggtcagcttgttggtctgcagggctttctgcacgttggccggcagggtggcgttgacctgggcgagggtgggaagggcgaaaggcaggagcgtggcgaaggcaagagtacgcagcgacttgaacattaatgaagaacccttgaagacggagggtagaaaatgaaatgaagatgaaaaacgaagcgaacctgaaaaaagagacggacatcacgcgaagaggccgtcttgctcattatgccgcaaggcggataacgatgcgctggagtttcgcggagttcgccgtcatatcgccgaatggtcggaactggtagagtgcgccggcaatccggccgcgtcgcgcggcttgccggggttcgcccgcggctccagcggcgtcggctactgtctgtaatgcgaggctccgccaatggagcgtcaatccaggagatgccgccatggctacgaatcgttcccgccgcctgcgcaagaaattgtgcgtcgatgaattccaggagctgggtttcgaattgaacttccactacaaggaaggcgtggatgccgatgcggtgaacgctttcatgttgcgcttcatcgatcaggcgatcgaagccaacgaactgacctatggcggctgcgacgaattcggtttcgtctgcctggcgcgccgtggctcggtcaatgaagagcagcgggccctgatcgaggcctggttgaagcagcaaccggaactggccagcgtcgaggtcggcgcgttggtcgacgcctggtacccggaacagcctgtcctgccgaagctctaagcgatagcgccgccatcccgcccgaggatggcggtcgcgtcttccctccctttcgatcctgctccggcgctacctggcccggcgcccgtcgtgcttccctttgccctgccaaggcatgtcggcggcttgtggccgtacatgcggatagcaatactccgaaacccctgacgaactattcaactcgctctggcagataacgagccgggaaggcgcgtatatatgcgggtgtttttcatgcagataaccaggccaattgcttggcaatatacgaggttttgaattcgccgtaagaaataaattaagtttccgtgagaatattccttaaagtatatgagttgccatcgagtatctcgacaatatggctcccgtctatatcttgctcaggagaattttttctgaatttttattggcaaggaaatcagacaatgagccgtatcctgatagtcgacgatcatcccgtgattcgcatggccatgaagatgttgctggaagccgaagggcaccagatcgtcggcgataccgataatggcgtggatgccatcagcctcgggcgggagctgaagccggacctggtcatcctcgatatcggcattcccaggctggacggcctcgaggtcatcagccgcctgatggtgctggcgttgcccctgaagatcctcgtcctgaccggccagagcgcctcgctcttcgccctgcgcagcatgcaggcgggcgccgccgggttcgtctgcaagcagggcggactggccgaactggtgacggcggtgaatgcggtcgcctcgggatacagttactttcccagctcggccatgcgtcctgtgcaacagggcgcctattccgacgatgtggaattgctcggacgcctgtccgatcgcgaagtatcggtattgcaatacctcagccagggttattcgaacaagcagatatccgagcagatgtttatcagcaacaagaccgtcagcacttacaaggcgcgcttgttgttgaagttgaacgccggctcgctggtggatctcatcgagttcgccaaacgcaatacgcttatctaagggccggaaccgaatgaagttccagaaacgcagtgcgtgcatgctcggcctgcttctcatattcgcctgcatggcgggatatgccgttccggcgagggcgacggctggcgaatattcttccatgctccggattcccgctccggatcgtccgggggacgccgatgtggtcgacgaagcgccgctacgccaggctgccgacgggctgcgctcgccatccccttccagcctggtgctcggcctgctggtggcctgcctggtctgcgtcggatgcctgggctggaataccgtcctgcagctcaggctcaggcgttggcaacgtaccgaagccgacctgagcggccgcctggcattgaagcaggcgctggtcgacgggattccctacccggtgagcatccgcacgctcgacggtcgcctgctggcctgcaaccgcaattacctggaaagcctgcggatgacccgtgagcaggcccgcggcaccctgttgaccgattccgactgggtcgagggcagcaaggcacggctcatgcaccagcagtgcctggcggtggctcggggaggaacggcgagcttcaccgacatggcggtgcgcatcggcgggcaattgctggagatccaccattgggtcacgccctacagggatcgccagggccgggtgctcggcctgatgaacggctggatcgacatcaccgaacgggagcgcctggcccgccagttgcgcgaggcgatgcgccaggcggacgaggcgaatcgggcgaagagcgtcttcctggcgaccatgagccacgagatccgtacgccgatgaatgcggtcatcggcatcctcgaactggtcctgcagcgcctggcgccggagcagcgcgaacgcgcctcgctggaggtcgcctacgaggcagcggggtcgctgcaactgctcatcggcgacatcctcgacgtcgccaagatcgagtccggccacctgaccctcacgcccgagcgggttcgcctgcgccatgtcgtggagtcggtgcgccgcatgttcgaaggcctggcccggcagaaaggcctgaggctcgttgtggagctggacgatgccccgggacgggacgtgctgatcgatcccctgcgcttcaagcaggtgctctccaacctggtgagcaatgcgatcaagttcaccgagcggggacaggtgacgatccgtctccaggaaaggagcctggacgaggggagggcgatcgtccgggtggacgtggaggattccggtatcggtatcgctccggcggaccaggcgcgcctgttccagcctttcatccaggtggccaagggacgcacggtgcagggcgggaccggccttgggctggcgatctgtcggaagttggtggacctcatgggcggcgatgtcgagatgcacagcgagccgggcaaaggcacccgggtgtcgctcgacctgctcttgcgccagtgcgggccgaaaatgcctgaatccagccaggacccgctggcagcatccatggagccgtctcgccgcctgcatatcctcatcgccgacgactatccgcccaaccgggtactgctgcgccagcaactggagtttctcggccaccgggtggcggaagcggaggatggccaggtggcgctggaactctgggccgacgagcgcttcgaggtgctgatcagcgactgcaacatgccgcgcctgaacggctatcagctggcacgcaggatacgcatccaggaacggtgcgagcggcgcgcgccgatcctgatcctcggctataccgccgacgccgagccggacgaggtacagcgctgccgcgacgcgggcatggatgattgcctgttcaagccgctcggcctggagaccctgcgcaactacctcgcgacctctttcggccgcgacgccgcgcagccccgggggctctatgacgcggacgctctcagcagcctcggtggcggccgcccggaacggctgcgcgaactgctggagaccctgctaggcagcaaccgtcaggacctccagcgccttgccatcctcctgcgcgagggcgacaggacccggctcgccgagcatgcccaccgcatcaagggcgccgcgcggatgatcggggcgcgtaccctgctggaggcctgcgaggccctggaggacgcctgccggcgaggtggcgacggggagtgcctgcaggcgtctggcgaaagactccggctggccctggaggcgttgcaggaggaactccaggagcagttggcggccgctgcggtatgagcccttccgttcaggaggggctcgagcgtccggtcatttcccgggccatttccgtggcgtagctgtcggtcatgccggcgatgaaatcgatcacctggagaaaggcgcggtacagcggccactgcgggtcgggcgcgttgcgtccgagcaggtcgaggatgcgccggttcttgaacgacggcgtatgcccgccgtattgctccagcgcggcgccacagaaggcgttgaggaggatctccagagtggtgtaggcgccgatctcgtggagggtcttgcgcttgtcctggaagatcttttcccgggcgatggccttggcccgctgcacgcagagcttggccgggccatgcatgtgttccaccaggtcgccggcaagctgcccggcgagcagggcctgctgctggtcgacgaaggcacgggcggcggcattggtcaggtgctcgatggctttgccgcggaggatcgccagtttacgccggcgggagtccctggggccgagttggcgataggtgtcgggcaggtcgtcgccgaccaggccgagcaacagcgcctcgacctcgctgtattcgagcagctccatttccaggccgtcttcgaggtcgatcaggccgtagcagatgtcgtccgccgcttccatcaggtagaccagcggatggcgagcccagcgctcgtcgtcgagttgcggcatgccgagcttatgggtgatctgctcgagcagcggcagttcgctctggtagcagccgaacttgtgcttcttgtagcccagcgcttcggcgtggcgcgaggtccaggggtacttcaggtaggtacccagggtggcgtaggtcaaccgcgtgccgccgtcgaactggtggtattccagttgggtgaggacccggaagccctgggcgttgccttcgaagtggagaaagtcggaacgctcggcgtcgctcatctcgtccagccagccacgtcctgcggcttgctggaaccagttgcggatcgcgtcttcgccggagtgcccgaatggtgggttgccgatgtcgtgggccaggcaggccgactggacgatgaccccgaggtcgctggggtcgcaccactcgggtagttcctcgcggaggatctcgccgacccgcatgcccagcgagcggccgacgcaggcgacttccagggagtgggtcaggcgggtgtggatgtgatcgttgctggagaccggatggacctgggtcttgcgtccgaggcggcgaaacgcgccggagaagatgatccggtcatggtccttgtggaaggcgctgcggcccagttcatcgttgctgtgtaccggctttccgagccgttcgcgggtgagcagggtctgccagtccatcgggaattccagggatgcgctgaggcgatgcggacacgctaacggtttgccttggcaagctcaatcgtcgcgttggggaaacggagggcgccgaccgttgccggtcggcgcatccttcaacggcctttctgcttgcgcaggccgagcaacagcggggccagggcgacgcccaggcgcagcagacgctgccagcgtccgcccttgccaagcagtacgcccagcagtgcggctccgccggcgccccagagcgccgcattgccaccgccgaacagttgctggctgaggttgtggcccagcccctgggcctggcggaagggttgcaccagcagttggctttcgcggcgcaattgctggcgctgcatttccaggcgcaggcggatcaccgccttgcgcaattcgcgacgcgacaggccggtcgcgttcaccggtagttggctcatgcgcgtttccttgtcatggcagcagtcgctcgcggtcgttggccagttcttccagggtggcgctgaacggcgagctttcgtcgttgatcgactggtacaggcgccagccgcagaacagcgagccgatcacgtagaacaggcacaacccgagcgccgctgcgagccggttggtgtcccagaacacgatcagcaccagcagcgacaggccgaccagcaggagcagggcgaataccagggccagcccggcgaacagcagcaggcgcagggtgttggccttctgttcctgcagctcgatgccgaacagctcgacgtgaccgtgcaacaggccgaggaaggcggcgccgaagcgccgcagggaggggcggccgtccgccgggtcctttccttcgctcatggctcagcgccggctgaccaacaggccaagcaggaagccgacgccggcggcgatgccgatgctctgccaggggtgttcgccgacgtacacctcggtggcgtccaccgcggcctggctgcgttcgcggacgttgtccttcagcgagtccttggtgtcgcgcaaggtatcgcgagcgcgcttgaggctgtcgtggatcttgccgcggatttcttcggcctggtcgcccgccacgtcggcggtgctttgcaggagtttctcggtatcggcgaccagtgcctggaattcagccaacagttcatcctttgcagcgtttgcagtggtcttgcggggcatgacgagctcctctggtcatggggtgtgtttttttcgagccgagcgcggggcggaaggttcaaccggtgggtaatttccgcgcgttgccggtcgctcccggcgttcctttcattaaagactgccacagcgtgcctgtcggcgcggctgcggcgagatgacgcccatccggctgcctcgcaacggggcgcgaactggtatggcgcttgcaattccctggtgcgcacgtcggccggaatgccccttgcgagggcgccaggcgctcccggagggtacttcgggatgaacgtccaacccaatgaaaatcaaggaaagtccgggagctttccatgctgcctcaggcaccttgcgaaacgtctgccgaagaaaagcggcggttcgcacgacgactactgcttcgtcatggtgcgttgaagggcgggcgtgggcgtttctggtgctttctctctacgcgcgaaggctgcctcaatccatggataacctgaatagtgcggtgcaagtcctgatccacggctccaataccctgttcatcctgctcggagcggtgatggtgctggcgatgcacgccggcttcgccttcctcgaggtgggcaccgtgcgcctgaagaaccaggtcaacgccctgtcgaagattctgtccgacttcgccatctcggcgctggcctatttcttcgtcggctactggattgcctacggcgtgactttcttccatccggcggcggcgctgaccgtggacagtggctatgcgctggtgaagttcttcttcctgctgaccttcgccgcggcaatcccggcgatcatctccggcggcatcgccgagcgtgccaggttcggtccgcagttgtgcgccacggcgctgatcgtggccttcgtgtacccgtttttcgaaggcttggtgtggaacggcaatttcggcttgcaggaatggctgaagctggagttcggcgcgcccttccacgatttcgccggctccgtggtggtgcatgcgctgggcggctggctggcattggcggcggtgctattgctgggcagccgcaacggccgctatcgcgacggcaagctggtggcgatggcgccgtcgagcatcccgttcctggcactggggtcgtggatcctgatcatcggctggttcggcttcaacgtgatgagcgcccagaccctcgctggggtcagcgggctggtggcggtcaactccttgctggcgatggttggcggcaccatggcgtcgctgctgatcggccgcaacgacccgggtttcctgcacaacggtccgctggccgggttggtggcggtgtgcgccggttccgacctgatgcatccgatcggcgcgctggctaccggcctggtggcgggggccctgttcgtctgggcgttcaccgcgacccaggtgcgctggaagatcgacgacgtcctcggtgtctggccgttgcacggtctttgcggggtctggggcgggattgcctgcggcatctttggccagcaggcattgggtgggctcggcggggtgagcctggccagccaggcgctcggcagcctgctgggggtgacggtggctttcgccggcggcctgttggtctatgggctgatgaaggcgctgctgggcatccgcttgagccaggaggaggagtactacggcgcggacctgtcgatccacaagatcggcgcgatcagccacgaatgagggggcggacttccttggtccggtggggtatcggcggataacgccccaggcgctatccgtcctgcacgctgcgagcgaggcatcccgccatgaaagaggccacccaagggtggcctcttcgttccgccgcggggctctggggaggggcggatggccgtagcgcggctatccgcggggcctgccgttaccagagcggcagcgtgtagctgacgatcaggcgattttcgtcgtagtcgttggtgtagttggtgcgcatggtcgcgttgcgccacttcaccccgaggttcttcaacgggccgctctggaacacgtaggcgatgtccatgtcgcgttcccattccttgccttcgcccgaggtggtcagcaggtcgatgttgtcgcccttgacgtagcgggtcatgaaggtcaggccgggaatgccgacgccggcgaagttgtagtcgtagcgcgcctgccaggatttctcgtccttgttggcgaagtcgccgatctggatgaagttcaccaggtaggggtcggcgccgttgatgtaggcgaagccggtgtcgccgctcatcttctggtagccgacgccgaaggcgtggtagccgaggctgtaggtgaacatggcgttgagcgccttgttgtcgacgttgctggaaccgtcgtcggtggagcgcgcccagcggatgtcggatttcagcgactgcttgtcggcgatcggcagggtgtgcaccaggccgaggtaatgctgcttgtagaagttgtcgagcttgccgtagtggtagctggtgctgaggctgtcggtccacttgtagctgccgccggcgaagtcgaacttgtccgaagtcagcccggaacggaccacgatgttgcgcttgccgccaccggtgatggtcatgtcctcgttgtccgaggagtcgcgctggttgaccttcttcaggcgcccggcgtcgagggtcaggccgtcgatctccatggagttcagcgcgccgccctggaaggtctgtggcagcaggcggctgtcgttgggcatgatcaccggcagcttgggggtcagggtgccgatcttcagggtgctcttcgacgcccgcagcttggcggtgatccctgcctcgccatagtcgtcctgggcgcggccggtctcgcggtcgcgcttgagcaggccggtgccgctgcggtcggggctggagtcgagcttcaccccgagcaggccgatggcgtcgacgccgaaaccgatggtgccctcggtgtagccggactcgtagcgcaggaggaagccctgagcccattcctcggccttggactggctggcgccttcctggcggaaatcacggttgaagtagaagttgcggagttcgatgctggccttgctgtccttgatgaactcggcatgggccagggttgggacggtaatgctggaacccagcgcggcaaaagccacggcacgggcgatcggggtcatgctcattgttattgtctcctcgagcgcttggggcaggccgatggcggcggcgtgacgccacgtcggcctgtgacagcccggttacttaagcactacaggaagacggccactgttagacattagtcgagggtggccgcgaattggcacgaaccctgtctaggacgggctttcccgctattccagccagtgcgggaagtagcccagggcggcctggacccgcgcatcgtgcgccggaatcacgctcaggcgcgggtcgctgcggagcagcaggcggatcttcgccagttgcgcgagggtgcgcgcgggatcgcgatcgaccagggcgcggccggcgaagaatttctgccgtgggccttcgacgccttcgagtcgccaactggtgtcgccgctgaagaacagccggcgcccgctgtcgagggtgacgaacagaccgaccgagccgggcgtatggccgggcagggggaccagcaccaggcggccgtcgccaaacaggtcgaggctttcgtcgaagcccatgaacggccgcggatcgaagctgtaaggtcgccagcgcacgccatggcggaattggctggggaaggcggccggcggggtggcgatgcggctgaaggcgatctcctcgtagggtgcccagaccggtacttcggggaagtcgaccaggcccgaggcgtgatcccagtgtgcgtgggacagcaggatgcgatcgacgcggataccggctgcgtccagttggtcgcgcgccgggacgactttctggtaagcgaacagcggcgctgcccaccaaggcatgtcggcgcggaactgggcgtcgatgtcgcgccccaggccagtgtcgaagagcagggtggcggcgtggtgctcgatcagcaccgcggtatggctgagcggcacccggcgcacccaggagccgccgtcgacggtgagcgcatcgagggtttccactcccgaggtgcgcaacagggcgactcgcatttccgccgcctgcaccggcaggacgaggagggcgatcaacaacgaggcaaggcgatacaggaaaggcatcaagattcaccggcaggaagaaaaggggatggctggggctcgccgaatgccagcggcaggcggccgcgccgccagcgccagcctgcggggcgcaacgccagcaggcgctcggcgccggcgggccaggggatggatggctgcgaacccggccagaacagctcggccttggcgtgcaggtgcagcaggtcgccattgtcgaaatcgatgaacaggaggccgcagcgaggatcctggagcaggttgccgagggtattgaacaggcggttgccggcatagtcgggcaaccacaggcggccatccgcgccgagccggagaaagcccggcggcccgccccgatgggagacgtcgacgccgcctctgagcgggtcggcatgctggctggcgatgaacagcgtatcgctgcgcgagaccagcgacagccagcgtggatcgagtccttcgccctgcaacgcgggacttgcgatcctggagacgggctgatggctgcgcgcctggatgtacttgggacagtttccgaaggattgctcgacgccgaccgtgaaaccctttccgtcccgcgccaggacccgtccattcatgcggttgcggcggcgggtcggccattccaggccgaggatgccgaggcgggtgccagcctcgagattggccgccagcggatcgtccgcttgcggcaggttgtcgatgcgcaggcgggtcggttccggcgaacgggcgaagccgggggggccccagagcaccgaggcgctggggtagccgtcggcgtcgaggctgcccaccagcaacagcgatagcagggagaagaactcccggtgctggtccggcatgaaggtgcggatcgcgcggctgccgaagccggcgacctgttcgcgaacgccggcgcgttcctggatcgccagttcgccggtgtggaagggactctgttcctggctcatgctgcctcctgccgagctacaggccgggcatcgggatgtagccgggcagcgcgcggatgcgggcgatccaggcgttcagcgccgggtagtggtccagcgccaggccgccttcgggggcgagggccaggtaggggtagagggccacgtcggcgatgctcggctgttcgccctgggccagccagcgatgctcggccaggtgccggtcgaccaggcgcagcacttccaggcctcgctggtgggtttgctcgcgatccagcggcaggttgaagcgagtgatcagccgggcgctggccgggccgttctgcacctcgttggccgaatagctgagccagtaggcgatgcggccctggctgacggggtcgagcggataccactcggggccggcatggcgtcgtgccagatagacgagaatggcgtgggagtcgcccagttgcagctcgccgtcttccagcaccgggacctgcccgcggggattcatgcggaggaaggcctgggtcttgtgctcgcggttgaggaaatcgaccggccgcagcgtcgcctcgcggccgatgagggagaggaacaggcggaccttgtaggcgttgccggagagatccaggtcatgcagtttcatctgagggttccaggcgggtattggtgcctggatattagacagacaggtctgtatatttcaaggcgcgcgttcgcctttttccgtcggtattcgtccggggagcgacgcagagcggttcaagggggcggcagggtcgcgcataatgggccgctcaggaggctttccatgacatcccgcaaacgcgagcaactgctcagcaccgccgtcgacctgttctatcgcgagggttaccacgccaccggcatcgaccgcatcctggccgaatccggggtggcgaagatgacgctgtacaagcactttcgctcgaaggacgaactgatcatggccgccctggaggtgcgtcggcagcgcaccgccgaacgcatgctcgaagccgaggcacggttgcagccgcgagcggcgatcctggcggtgttcgatggtctgcaggagttcctccaggacgaggcgttccgtggctgtgccttcatccatgccgccgccgagttccatgagcgctcgcatccgatccatcgccaggcggccgagcaaaaggccttcgttgaagcctatttccagcgccagctggagcgcctgggcgcgcgttcggcggcactgcttgcgcggcagttgcaatacctgatggagggcgccctggtgatggcgcacatccatgggccggcggatcaggctcgcgaggcccggcaggcggccgaaagtctgttgcaggtcgctggcatctgagcgcgggtgctaccatcgccgcgaaacactgcacaggtcctttcgatgcccccggaatgccaactcttcggaaccctcggttgccacctctgcgaagtcgcggaggcggtgctgatgcccttcgtcgaacatggcctgctggtcgaactggtggacatcgccgacgacgaagcctgggtcgagcactatggcctgcggatcccggtgctgcgccgctgcgacaatggcgccgagctgaactggccgttcgaggccgagcaggtcgcagccttcctcagctactgatgcctattcattcgcgctaagcgcggcaccgctggtaaccccgcgctctatgcgcaaaccggactgcgttccgcttccttcccccatgccgcgcggtgcctggcttcggcgatgctggtgaagcgatgcataggcgtttctcaatggttttcatagcctgagtctattggctcggcaggctgcgttcggctaggcctaagggcgatggataaaccctgagttcccttcaggactgactggaaacagccgggaacccgcgtggcgcaggacgcgtcgcaggtcgttcggtccgctgtcgcggaccgccggggtgtgggggtcgggacgacgaggctcggcgtttcctcataacgaaagaggacgcctgatgaaaacgcccgcctggacgcgccatgccctctgggtcatgccgctcgccctggggctgcaatccgccgtggtcgcgggggatgagcagccaagcaagacttccagctattcgccggtggtgatcaatgaggacttcgccaccatcatgaagcgcatgacggcgaacaagccgtcgatcgaacaggcccacaagacgcttctcgagcagcgttacgatctcagcgacaggccggccaagggcgccagcatgacgcgcggcaagccgctgcaggaggggatccgggtgaagctgccggccggcaccagctgggaggaactggccaggctgagccccgaggaaatccgcaagcaggggctgttccccggtggcttcctgccgctgccgcaccccaaccatgccgaaggcgggatggtctttcccaagttcctcatcgacgagatcaagcgccaggaaagccgcgacctgacccgtttcgacctcgactacgacctgccggaccacttcctgccggaattcccggcaccgatgttccttaccacccggcctgacctgggcgatgtgtccaagggcaagctggtgaccatcgacaactatttcgagttgttcaacgggattctcaatcccaagcagctggaagggctgcgcctgctgctaacggcctttccgcagcagcagttcaacctcaccgacgatcgccgtagcgagcatccgagccgcggcgtagcctgcttcgactgccatgcgaacggccacaccaatgccgctacccacctggccggcgatgtgcgcccgcagccgttccgccaccgcatcgacacgccgacgctgcgcggggtgaacatccagcggttgttcggctcgcagagggcgctgaagaccgtcgaggacttcaccgagttcgagcagcgcgccgcctacttcgacggtgatccggtaatcgccaccaagaagggggtgaacgtgctcgagcgtggcagtcaggtgcatttcatgggtgagttccaggcgctgctggacttccccccggcaccgaagctggatgtggaggggcggctcgatccgggcaaggccagcgagcaggaattgcgtggcgaaaagctgttctacggcaaggcggcctgcgccgggtgccatgcgccgccttacttcaccgacaacctgatgcacaacctgaaggtggagcgcttctacgatccgaaactggtcaatggcgtgatggcgtccgccgacgggccgatcaagaccttcccgttgcgcgggatcaaggattcgccgccgtacctgcatgacgaccgcctgctgaccctggaggacaccgtggagttcttcaacctggtgctggagcgcaagctgtccgcggaagagaagggcgacctggtggcctacctgcgtaccctgtgagaaaggccgaatcgcaggcaataaaaaacccgccgttgaggcgggtttttcgggatatggtcggagcgactggattcgaaccagcgaccttctcgtcccgaacgagacgcgctaccaagctgcgctacgctccgttttgttggggcgcattctacagaaaaagttttggtacacaaggggttagatgaattttttttcgagccccggtttccccgggcgaaaaagcaaagaccccgtcgctcgttcgagtcgacggggtcttcaggaaaacctgttacgcgacggtatcagagttccttgacggtgcggacctggtccttgttcacgcgggcgcgcttgccgtcgagctgttcgaactcgtagaagccggaatcctcgtcataggaaggggtgtctacggcctggatttcacgtccgtcgttgagggtgatcacggtagggctggaacaacccgcgagggcgccgaggcctacggcgaggaggagggcgggtagcatccgcttgatcattgcgcagttctcctgtgcggtcagactttgaagttacgagtttctgacagacgagttctaggaagagttcccccctaaaaacgagtgttccccccaccttcgagaaaattcgactcgacgtcccttccgttttacttcagttcgcggtgattagccaacagctcgggggtgttcaggttggccagccgcggatcgcccgcggccagctcgatggcctccgcgccaagcggcaacagcacgtggcgtgggctacggtcgccctggcgccaggcgtgttctatctcttcggccaggtgcgtcgggatcaggctgaacagcggttcccactggccgccgcagcgcagcatccaggggcgcgccggtgtgcggccggcggcctgcagcagggtttccagcaaggcgcggtcgatgcgcggcgcgtcgcagggcagcaccagcagccagggatgccgggccaccgccaggccggcgcggatgccggcgagcgggccggggaagtctcggctgtcgtcgctcaccaggcggtcggcataggccgcatagcgttcctggttgcggttgcaggagacgatcaggtcatcggtgagcgggcgcaccaggcgatgcaggtgggcgatcaggggcaggtcctgccactcgatcaggcccttgtcgcgaccgcccatgcgctggccgcggcctcccgccaggagaaggatggagcaggggggcagggcgctatcgggcatctggggtctccgtgtcgggcctgtgatataacaccgcgatcacgtccacaagcaagggccaaccccatgagccacaaggccgaaacggcattcgtgccgttgaacatcgccgtcctgaccgtcagcgatacccgtaccctggaaaccgatacttcaggccagttgttcgtcgaccgcctgaccgaggccgggcacaacctggccgctcgcgtgctgctgaaggatgacctgtaccggatccgcgcacaggtcgcgacctggatcgccgaggatagcgtgcaggtcgtgctgatcaccggcggcaccggtttcaccggccgcgacagcaccccggaagcggtggcctgcctgctggacaagcaggtggacggcttcggcgagctgttccggcagatttcgctggccgacatcggtacctccaccatccagtcgcgggccctggccgggctttccaacggcaccctggtctgctgcctgccgggctccaccaacgcctgccgcactgcctgggaaggcatcctcgtcgagcaactggacgcccgtcatcgcccgtgcaacttcgtcccgcacctgaaacaggcggcgccctgcgagagccgcgggtgagcggctgctgcgaacagccggggctgatgccggtcgagacggcgctggaacggctcctcgaactggccgcgcaaacgcctatcgatacgtgtgagcaggtgcccctggagcaggctggcggccgcgtgctggcggtcgacctgctggccggcctggacctgccgccgtggccgaacagcgccatggacggctatgccttgcgcctcgccgactggaacggcgagccactgccggtcagccagaagatctttgccggacaggcgccggagccgctgcaagcgggtacctgtgcgcggatcttcaccggtgcgccgctgcccgaaggcgccgatctggtagagatgcaggaaaacgccgaagcgctcgacgatggccgcgtgcgcttcacccagccgttgcgcgcgggccagcatgtgcgcccgcgtggccaggaaatccgccagggcgacctggtcctgccggccggcacgcgcctgcgctccatcgaactggggttggcggcttcgctcggctacgcggccctggaggtgcgacgcaagccgcgggtggcgctgctgtccaccggcgacgagctggtcgaggcgggccagccgctgcaggccgggcagatctacaacagcaaccgtccgttgctcaaggattggctgcaacgcctgggctgcgacgtgctcgacgccggcatccttcccgacgacctggcacgtacccgcgagcgcctggccgggttggccggggtggaccttatcctgtccactggcggcgtatcggtgggcgatgccgacttccttggcatggcgctgcgcgaagccggcgagctgaccctctggaagctggcgataaaacccggcaagccgctgaccgtcggccagttccagggcatcccggtgatcggcctgccgggcaatccggcttcgaccctggtcaccttcgccctgctggcgcgtccctacctgctgcgccggcttggcgtggcgcaggtcgcgccgctgcgggtggaggtaccggccggctttgcctggaccaaggcggggcagcgtcgcgagtacctgcgtggtcgcctggagcagggccgcgcggtgctctatccgaaccagagttccggggtactgcgcagcgcttcctgggccgaggggctggtggaggtccgcgagggacgtaccctcgtggaaggcgagggcgtggcgttcattccgctgagcgaactgctcgattgagccgacggcggccggatggccgccgttctcattgcgccgccggctccttgcgccgttgccggtactcgccgggcgtctgcccggtccaacccttgaaactgcgatggaacgagcgcgactcggtaaagcccaggtactgggcgatgtcctggatcggcagctcgctatgcagcaggtagtgctcggccagttcgcggcgcagttcgtcgagggtctgctggtagctgctgccggcttgctgcaggtggcgttgcagggtgcgtacggtcatgccgaacttctccgccacccgttccttgcgcggcaggccgtccttgagtagctggcgcagggcgttcttcacccgcagcggcagcggttcgtcatcgtccagctcggccatcagcgccagggcatgttcctccagagtgcgcagcagcgtcgcgtcggcctggcgcagcggcagcgccaggtagtccagcggtaccagcagcgccgaacagggttgggcgaagcgtaccggacagccgaagaaggtctcgtagtcttccacgcgggttccgtccggcaggtcgtgttccagccagacctcgtccggcgaaccttccaggtcggcgatccagcgcgcgtagaggacccaggaagccaggacgtgctcgaccatgtggcgccgtaccaggggtgtctggtggcggcagttccagatcagccggacctgcccgccggccgcctcgatgcggctggtgcccatgtcgccgaccagcttctcgtagggcgtgatgcggctcatggcctcgcccagggtggcgcagttcatcgcgatgtagccgagcacgctccaggagccgggctggacgaaacgcgccgaatgcaggccgaacaggggatcgccggaatgctcgcagaaatagccgagcaggcgctcgtgggcttcgcccggcaggcgctggcgattgtcgttgagctggtcggcctggaggccggcggcggccagggcaggggcgatgtccaggccgagccgttcggcatggcgcaggtatttcagcagggccggaaccgaggtggagccaagggtctgcatggtcgttgttcttgtcgtggcgggtggaacaggccgtccggcgtgcgtgccggctgtcttgatcggtcacagggagtgtctcgatccgacagtgacaggcgagggcggctggctagtataggcagccagaaaggttccgataaacaggttgccgcgacaagcgaggggagaggttcatgcgccgttggaatggctggggcgaagaaagcaccgtggtcgaattgccggacagcgcccgtgggttcctggcggaactggtcgggcagggcgcacgcttgccggacgccagcctggaggcggcgctggcgaaggtccctgcgtcgcgcctggaggccgatccgcgctacagcatcgacccccgtgagcgtctgctgcatgcccgcgggcagagcctgccggactggctggcgatgcgcgagggcgacttcggcgtctacccggacgccgtggcctatccggaaaccgccgaacagatccgcgagttgctggccctggccgactcccgcgacctgcaactgattccctatggcggcggtacttccgtggccggccatatcaatccgcaagcctcgcggcggccggtactgacggtctcgctggagcgcatgaaccgcctgctcgatctggaccgcgagagcctggtcgcgaccttcggccccggcgccgccggcccgcaggtggagagccagttgcgtgcgctgggctacacgctcgggcatttcccgcagtcctgggagttgtcgaccctcggtggctgggtcgccagccgctccagtggccagcagtcgctgcgctacgggcggatcgaacaacttttcgccggcgggaccctggagaccttcgccgggccgcttgaaatcgctaccttcccggcatccgcggcgggaccggacctgcgcgaactggtgctgggctctgagggacgcttcgggatcatttcctcggtgaaggtgcgggtctcgccgctggccgaggacgagcgcttctacagcgtcttcctgccgaactggcagcaggccctgcaagccacccgcgagctggcccaggcgcgcgtgccgctgtcgatgctgcgactgtccaacgccgtggaaaccatgacccaactggccctggccggccatcccggacagatcgcctggctggagaaatacctggcgctgcgcggcgcgggcgagggcaagtgcatgctgaccttcggcgtgaccggcaaccgccggcagaacggattgtcgctgagccaggcgaaggccttgctgaaacgcttcggcggggtcttcaccggaaccctgctggggcgcaagtgggcgcagaaccgcttccgcttcccctacctgcgcgaggccctgtggcaggcgggctacgccgtggacaccctggagaccgccaccgactggagcaacgtcgacggcctgctgcagaagatcgaggccagcctgcgcgacggcctggccgccgagggcgagaaagtccatgtgttcacccacctctcgcatgtctatggcgaggggtcgagcatctataccacctacgtgttccgtccggccgcgagctatgcggcgacgctggagcgctggaagcgtctcaagcatgcggccagccaggcgatcgtcgacaatcgtggcaccatcagccaccagcatggcgtcggcaaggaccacgcaccctacctgccccgcgagaagggcgaactgggcgtcgccgcgctgcgtgccatggccggtcacttcgacccggccgggcggctcaaccgcggcaccctgctgcaggactgagcggaatgacttcagcctggaacgaggagtggcgtcgccgccgcctgccggcgctggcggggcaggagtgggacctgatcgtggtcggcggcggcatcagcggtgccggcatcctccgcgaagccgcgcggcgcggctggcgctgcctgctgctggagcagcgggacttcgcctggggcacctcgagccgctcgtcgaagatggtccatggcggcctgcgctacatcgccaagggccagtggcggctgacccgcgactcggtgcgcgagcgccagcgcctgctcggcgaggcgcctgggctggtggagccgttgagcttcgtgatggcccactaccgcggcggctttcccggcccgcggctattcggcggcctgctgagcgtgtacgacgcccttgccgggcggcgcaaccaccgtttctacgacgccgctgcgttgcgctacctggcgccgggcctgaaggaacaacggctgctcggcggcacgcgtttcttcgatgcggtgaccgacgatgcgcgcctggtgctgcgggtgctggccgaggcgcgtcacgacggcggcgaggcattcaacggcatgcgtgtgcgcgaattgctgcgcgagggcggccaggtggtcggcctgcgcgccgaggaccgcgagagcggcgagcttctcgacttccgctgccgcgccctggcggtggccaccggggcctgggccgatgagttgcgccagcccggcggaagcgagcacatccgcccgctgcgcggcagccatctattgctgccggcctggcgcctgccggtggcccatgccttcagcttcatgcacgccacggaccggcgaccggtgttcgtgttcccctgggagggcgcgacggtggtcggcaccaccgatctcgaccatcgcgacggccttggggaggacgcgcggatcagccgcgccgaactcgcctacctgctggcggcctgcgcccagcagtttcccgccgccgccatcgaggcgcgcgacgtgctgtcgacctgggccggcgtgcgaccggtggtcagcagcggcgacgacagcggcaagccttccgacgagaaacgcgagcatgtgctctggcgcgagccgggctgcgtgaccctggccggcggcaagctgaccaccttccggccgctggcggtggaggtgctacaagcctgcgcgccgctgctcgggcgcacggtcacggacgatggcgcggcggtgttcggcgcctgcgaaggcccgctcatcgacgggctcggcagcggccagcgacgccgcctggccggtcgctacggacgcgacctggtccgcctcaagcggctggtggacaccctcggaacggactgcgtgggtgccagcgaaacgctctgggccgaactggcgttcgccgccgaggcggaaatggtgctgcatctcgatgacctgctgttgcgccgcacccgcctcggcctgctgttgcccggaggcggcgcggcatacctgccgcgtatccgcgcactctgccaagcgcgcctgggctgggacgacccgcgctgggaacgtgagcaacaggcctatctggacctctggcgccggcactacagcctgcccgtctgaccagccgagacgagaacgagatgaacgacaagaactatctgctggcgatcgacaatggcacccagagcgtgcgcgccctgctgttcgacctgcagggcaacctgctgggcaagggcaaggtggagctggaggcctactactcgaagcatccgggctgggccgaacaggaccccgagtactactgggcgatgctcggcgaggcctgtcggcggctctgggaccaggtggacatcgatcgcgggctcatccgcggggtgtcgctgaccacccagcgtggcacggtgatccacgtcgatgccgagggcaggccgttgcgtccggcgatcctctggctcgaccagcgccgggcggaggtccgcgagcgcatcagggggccttggggctggctgttcaagctggtcggcgccgagggcgcggtggagcatttccgcgcccaggccgaggtcaactgggtggcccaggagcagccggagatcgctgcgaagaccgacaaggtgttgctgctttccggctttctcagccaccgcctgaccggccgtttcgtcgactcggtggggtgctgcgttgcctacctgccgttcgactacaagcgcctgcgctgggccgcgccgcgcgactggaaatggcaggcgctggcggtacgccgcgagcagttgccggagctgttcaagccgggcgagcggctcggccagatcagcgccgaggccagccggcacaccggcattccgcaaggcctgccgttgatcgccgcgggggccgacaaggcctgcgaggtgctcggcgcaggtgcgctggagcccaccatcgcctgcctctcctatggcaccacggcgaccatcaacaccactcgcgcccgctacctggaaaccgtgccgctgattccaccctatccggcggcgattcccgatcatttcaataccgaggtgatgatctatcgcggctactggatggtcagctggttcaagcgcgagttcggcttgcgcgagatgcagcaggcgcgcgagcagggggtcgagccggagcaactgttcgacgaactggtcaacggcgtgccgcccggctcgatgggcctgaccctgcaaccctactggtcgccgggaatccgcgaaccgggactggaggccaagggggcgatgatcggtttcggcgacgtgcatacccgggcgcacatctaccgggccatcctcgagggcctggcctatgccctgcgccagggcaaggagcgcatcgagaagcgttcgggcacgccgatcgtgcgcctgcgcgtggccggcggcggctcgcagagcgacgcggcgatgcagctcaccgccgacatcttcggcctgccggccgagcgcccgcatgtctacgaggcgtccggcctgggtgcggcgatcgactgcgcggtggggctcggcctctatccggacgtcgccagcgcggtggccgggatgacccgcgtcggccaggttttcctgccccaggcggaagcccggcagatctaccagcggctctatggcgaggtctacctgcgcatgtatcgccagttgcgcccgctctaccgcagcattcgcgagattaccggctaccctgcctgaaccgggcgccgcacttccgtcccggatacgcggtcaataagcaaagacaaggccacgacgaggggttcggttcgatggacaaggacaaggttctgctggtcctgcacggcaagcaggcgggcaacgaagaggttcgtgccgcggtcgcggcacagcgcgaggccgggcgggagctggcggtgcgggtaacctgggaggacggcgacgcccggcgcatcgtcgaggaggcgctggcggccggctatgcgacgctggtcgcgggcggtggcgacggcacgctgcgcgaggtggccgaagcgctggcgcgcgggcgaggcgaggcgagcctggcgatcctgccgctgggcaccgccaacgatttcgcccgcgccgccgggattcccctggaaccggccgcggcgctggcgctgctcgaccagacggcgcggccgatcgacctgggcgaggtgaacggcaagctgttcctcaacatggccactggcggcttcggttcgaaggtcaccgcgaatacctcggaggacctgaagaaggttctcggcggtgccgcctacctgttgaccgggttgacccgtttttccgaagtgcatgccgcccagggccgtttcagcgccccggacttccagtgggaaggcgagttcctcgccctgggcatcggtaacgggcgccaggccggcggcgggcacgtactgtgtccgcaagcgcgagtggacgacggcctgctggacgtgagcatcctgccgacgccgcaggacatggtcggtaccctgggcaccctgctcggcggtggcaacggagtggaaagcctgttcgtccgcgcgcgggtgccatggctggaagtggaggcggcggaaggtctcgacgtcaatctcgacggcgagccgctggaaggacgcaagctgcgtttctcggtttccccgggcgcgctgcgcgtgcacttgccggccggctcgccgttgttgcgcgagccgccgcgcgaggactgagggcggggccgactgatccgctgcctggagtggcgtctgtgtcttgtcggcctttcccgcgacaccgtataacagcatctttccaccaaggatgctggttccatgttccgtctctccgcgctgtaccgctatccgatcaagtcttccgccgccgagtccctggagcgcgtcgcgctcgatgcgctgggcgtggtcggcgaccgacgctggatggcggtggacaccgaaaccggacgtttcttcacccagcgcctgctgccgcagctggggcgtatccaggcgcgctgggcggcgccggaggtcctgcggctgaatgcgccggggatgtccgagctgagcctcgaagtaccggcagccgacgccaacctgcgtggcgtcacggtctggcgcgataccttgcaggcgccggatgccggcgacgccgcagcggactggctgacgcgcttcctcggccgcccgacgcgcctggtgcacattcccgaggcgcgcgcgcggcaggtcgataccggctacgccgaaccggggcagaaggtgcatttcgccgacggtttcccgctgctgctgatcggccaggcttcgctcgacgacctcagccagcgggtgggccggccgttggagatgctgcgcttccgtcccaacctggtggtggaaggcagcgccgcgttcgccgaggacggctggaaacgcatccgcatcggctcggtcgagttcgtcgtggccaagccctgttcccgctgcatcctcaccaccctggatccggcgaccggcgagcgcaacgaggaccgcgagccgctgacgaccctgaagacctaccgggaaaaggatggcgcggtgctgttcgggcagaacctgattgcgctgggacagggcagcctggaggtggggatgccggtggaaatcctcgactgaggaacggtcgcccgccgttgcggcgggcggccattgccggcgatcagagcttggcgtcgacgcaaccggtgctcaggcactcgcgctcgcgttcgcggaggaagtcgaggcgctggcgggtcttctcggtggcgcagtcgaggttgacgaaataaccgttgtccttgctttcgctgcaggccgcgtcgcgctccttgatccaggcgatctggctcttcttcagcagggctttctggccgtcgttcaggtgcttgcgcagggtgccgaactgctggttcagctcgcggtcggcctgggaaaactcgccgctgcggcagtacacgctgtcgaaggcgttgcgcggcgtaccgcaggcgtcggcggccagggcgccgtcggcgagcagcagactggaggtggcgagcagggcggtggcgaggggcttgttcatcttgaggtccttttcaaggtactggaaaggcccgggcgtccgggccgggttgggggtcagaaatcgtcgaagtagcgttcgtgccagtcgacgatgggctgcggcgcattgagcttctgcccgtagatcaccgcataggacagcacgttctgcacgtactggcgagtctcctcgaacggaatggtctcgatccacacgtcgaaggccaggtggcgggtatctttcagccactggcggacgcggcccggaccggcgttgtaggcggccgaggcgagtacccggttgccgttgaactggccatgcacctggctcaggtaggcggcgccgaggcggatgttgacgtcgggcacgatcagttgctgggtcgaggccagcgggatgccgaacttgcgcgaggtctccttggcggtgccgggcatcagctgcatcagcccggtggcgccgactccggaacgggcatcggacatgaacgcgctttcctgccgggtgatggcgaagatccaactggagtgcaggccgcggttcttcgcttcgcgcaccagggtggcgcggtgcgccatcgggaagcggatgtccaggtcgtcccagtactgcgcctggctgatcgagcggatcgccgggaaataccactgcatgtcgtaggccagcctggcctgggcgatcagctcgtcgcgatcgaacaggcgcgcggcgtggtaccactcgcggcgggcgttgatcacttcgccacggttgaagaactccatggcccggcgcgtactggcggcgttgcgtacgcgttgcaggacgcgcgggtcgatgtgcgcaggacggttgccgagcttgtacggcacgctcaggcggtcggcggcgaggaagccgtagaagtcgcgctcgccggcgagcttctggtacagcgcgatcggctccttgctgttcggctgcgccagttgcaggctgcgtgcctgccaatagcgccagcggctggtggcggcaagatcctggggcagcttgcgggtcagcgcgtaggcttcgtcccagcggcccaggcgcagcagcaggcgggtgcgccattcggtgacggtgttgtcgcgcaggccgggatcgtactgggtcatcagcggcagtgcgcgcggatcgaagcgcttggccaggctgagaccgatctcgcgggcgatggcgaccttctcgtcgctggagaagggtagcgccgagctgtagtagtcgagcaggctaagggccttttccgggtcctgccgcgccaggcggcgcaggccgagaccgaccacgtcggcggtggcatggtcgcgctggctgaagcggccggtctggctcagctgggcggggttctgcgccacgctgaccatcagcgcgccctggttgccgagggtcggcaggcgctgcgcgaggtgcgaggcgaggctgtagttgcgcgcttcggcggccagcttgaggcgtttccagaccttttcctcggtgagctggccttcgccctgccagaggccgaacagggtgtcgcaggcagccggctgcgacttgccgaccagccacaggcgttcgctggtggcgtagccttcggccttctggccgtggcccagctggtactggccatacaggcagtcgagttcggtgaagttcagcttcggatcgtagtagttgacgaaggtcttccagtcgccgcggtcggccagcaggcgcagccagcgcagtttcagccagccgatctgcggcaggtcgccgtgttcggtgaggaagcgctcgacctcctcgttgctggcggacttcagccggtgggtcagttcgtcgtaggccaggtagggttccagcgggtaatcgcgcagggcgctgcgcgaggccatgtagggcgcgctgttgcctttggccagggcggccttggcctggtcgtagagacggcgttgttcggtcagggaagcggcgtggaccgcgtcgacgaaggaaatactgagcaaaaggcaggaaacgagagtgaacaggcgaccgcgcatgacttatccgggcaggtgatgtcgggtaacgtcggcaggtccgcaacggctgcctacgggcgtttcgaccgctcgcgggactggcgcgcgaccgctgtcgcggggcgcgcccgaagccgggcggatggctcgcctaagcttagccgttgcggcatggcggtgaaagcgccgtgccatccgatgcctatccggcgtaaaatgcgcgccctgtttccggaggcgcccatgaccctgctcaagttcaccgatgtatcccttgcctttggcaccactcccttgctggacaaggtgtcgtggcagatcggccgtggcgagcgggtctgcgtgatcgggcgcaacggtaccggcaagtccagcctgttcaaggtggtcaagggcgaacagcaggccgacgacggcgaagtctggcgcgcaccggcgctgaagatcggcgaattgccccaggaactgccgcgtgccgacgaacggacagtgttcgacgtggtggccgagggtctggcggaagtcggcaagctgctcgccgagtaccaccacctgagcctgaacatccataccgacgacgacctggcgcgcctctcgcgggtccagcaggaactcgaggcgcgcgatggctggcgcctgcagcaactggtggacagcaccctcagccgcctgcagttgccggccgacaagaccctcgccgaactctccggcggctggcgtcggcgcgtgctgctggcccaggcgctggtcgccgagccggacctgctgctgctcgacgaaccgaccaaccacctggacatcggcgccatcgcctggctcgaggaagcgctgctgggcttcaacggcgcggtgctgttcattacccacgaccgcgccttcctgcaatccctggcgacccgcatcctcgagctggatcgtggccacctgatcgactggaacggcgactacgccagtttcctggtgcacaaggaacagcaactggccgccgaagaagctgccaacgcattgttcgacaagcgcctggcccaggaagaagtgtggatccgccagggcatcaaggcccgccgcacgcgcaacgaagggcgggttcgggcactgaaggaaatgcgtcgcgaacgcgccgagcgccgcgagcgccagggcaaggccagcttccagctggaaagcgcggacaagtccggcaagcaggtgatcgtggtggagcacgtcagcttcgcccatcccggcggccagccgctggtacgcgacttctccatggtcctgcagcgcggcgaccgtatcggcctgctcggcgccaacggtaccggcaagaccaccttgctcaagctgctgcttggcgacctgcagccgacctcgggcaagatcgaggtgggcaccaagctggaagtggcctacttcgaccagttgcgccatcagctcgaacccgagcagacggtgatcgacaatatctccgaaggccgcgagttcatcaccatcgacggccagaaccggcatgtgctcagctatctcggcgacttcctgttcagtccgcagcgcgcccgcaccccggtgaaggcgttgtccggcggcgagcgcgcgcgcctgttgctggccaagctgttcagcaagccggccaacctgctggtgctcgacgaaccgaccaacgacctcgacgtggaaaccctggaactgctggaggaagtcctgctcggcttccagggcaccgtgctgatggtcagccacgatcgggccttcctcgacaacgtggtgaccagcaccctggtcttcgagggcgagggcaaggttcgcgaattcgtcggtggctaccaggactggctgcgccaagggggcacgccgcgcctgctcggcgtgagcgagtcgaagagcggcaaggccgagctgaataccgcgctggcgcccgccgccgaacccgcgccggctgctgcggcgccgagcgaggcgccggcgaagaaaaagctcagctacaagttgcagcgcgagctggaggctttgcccgggcagatcgacgcggtcgaggcggagctggcgggtgtccaggaaaccatcgcgcagcaggatttctatctgcgcccgcaggacgagcagcgcgaaaccctggcgcggctggacgcgttgcagcaggaactcgatgccttgctcgagcgctgggccgaactggaagactgatccatctcgaaaaagtgagctgcatcaatgtgatagcggctcatctcgatgatccttgcgggccttgccggcggtgggtgcagtcccccgtcggtccctctggctggcgtcattgacgggccggccgtctcccgagaaaggatcagtccatggcaatcgagtaccgcatcacgctggacgaccagcatcagctcaactatcgcatcgagctggagcggcactacgacccgcaggcggctgccgcagcgccgcgctggacgcgcctggaacacaatcgctgcagcaactgcccgctcgatcgcgaacgctacagccattgtccggcggcggtcgacctgcatggggtgatcgaggatttccgcaacctgccggcgttccgcaaggccggcatctgcgtgcgcacgccggagcgcgagtacatcaagcaggcgggcctggaggaaggactgcgcgcgctgatcggcttgatcatggccagcagcgcctgtccgctgctggcgccgctgaggccgatggccatgcagcacctgccgttcgccagcaaccaggagttcgtgctgcgggtggtgccgctgtacctgatgcgccagtacttcaacttccgcgaggggcggcatgccgattgggaactgaaagggctggtgcggctgttccagcagttgcaactggtcaaccaggcgttctggcagcgaatccacgacacctgtgtcagcgattccaacctgaaggcgttcctgaccttcttctcgctgtcgtcgagcatcagctattcgctggaaacccagttgcagaagatccgcccgctggtgatgagcgccgaggaaacgctcggctgaggcgcaggccccggccgagcggggagagatcaggctttcttcaggtgcaccgcgagcacgtcgcagggcgcgccgtgcagcacgtcgttggcagtggaaccgagcagcagcgccaggccgtggcgaccgtggctgccgaccacgatcaggtcgcaggcctgttccgcggcgaggcggtggatttcctggcgcggttgcccgtagaccaggtggcgctgctcgctgccgaggtccggatagcgtacggcgaaggcatccaggcgttcacgggcctggtcgaactgctgctgctgcaacatcgacaggtccatcggcacgtccccaccgaaggccatggccatgggctcgaccacatgcaccaccgagagccgggcctggttgctggtggccagggccgccgcacgcttcatcaccgggtcgcattcgtcggtcaggtcgacggcgaccagaatgtgttgatagggcatgaacgtctcctcccagaaggggatagtgttttcattatggactttcgcgccgcgcgtggaacctgttccgttgcgctgggcaaaaagctgctccgccgtggtcgcattcgcctgtaaactgcgcctcccttggcgactgcgaccgatcctgcctgcgcgcgcggatcgaggcaaatgccttaaccgtttttcgagtgtccgttccttatgaccacttggctggtgatcctgctgctggctgtcatgctcagtcccctggcctggctgatgccgtccaacaggcagcgcggcaagatggccctgcgcctcgaggcgcgccgtctcggcctggccatgcagctcgcgcgccaggattggccgcattggctggagagcgctccgccgacgtcctgcgcgcagttccactgcccgcgccgacgcggccgggaggcctggtgctattggcagaataccccgggccagtggctgaaccagtggcgcgagccgtgcgcggacgatgagttgctggacgccctgcgcagcctccccggggatgtctacaaggtagaggcgaccgcccagttccttgccctgtattggggcgagcgcggcgatagcgccgacctcgggcgcatcgccgagtttctccgccagcgcgcctgaggcggcgcgccgaggttcattggttgcgcgcggcatacagcgcggcgaccttctccaggccatcgatgatccggtctgcattcttgttgaccaggaacggcacgctgttctggttgtagttgcgcagggacttctcgatgtagtgccacttgatcgccacgctgcgcagcgccctggcgatctcctcgtcgttctgcggcgcctgctgcagcttcaacaggttgaccgaaaagcggctggccaggtcgtccagtggacgctcctcgccgccgccgaagaagctggcgcccaccgacgcgttgcgcgaggcatagtccagagcaatgtcctgcatcagcaggctctgttcgcggctctgctcggtgagcgtcggcaccgtggcggcgttttcccgttgcaggctgcgatacaactggccgccgaggtccatcagttgctggttgcgtcgtaccaggtcggcgaccggttgcaggtcgctgtagcccttgttgcgcaccgcgccggtcagcttgtcgaggtcttgcgcatagtcccgccattgctcgcgaagctggcccagcaggcgccgggattcgctgccgttcacgccgtcgagtcgctgcaggcgggcttccgccgtctgcgccgagctttcgatcaggctggcgtagcgttgatcgccttcctggccgacgtacatgaagaaggcgttcagggatttctgcgtggcgagccgcatctggtgcagggcgagcaggtcatcggcggtccctgccgcgaagacggggaggctcagcaggccgagcagggccagacaaagagtgaacggacggcagatcatgggttccatctccatgtggccctggaggccttcttgttgttcttttgtaacggcccgtggccgatcatgcatggcgatctgcggcgactctagcctgcctttccgcaccgggacaagcgcccacggcgccgatcatcgaacatctgaatggtccgacagaggctggctgaatggccctgcgcagagggcctggaggagggcaggtgttttccggatggctgattgacaattcccggcttttgccggaatgtgtgcgcacccaagtcaaacgggcgtatgaatcgagcgtttgcctcgcgcaggcctcgacaatagagacccggttatcgcgtcggcgggtgtgccgaagggtttgggactatgctcggcggttgccgaaggggtcccgacacggcgtccgatgtgtaagttcaagcttccataatagcgtggagatcagttgatgatttaccaaggtaaagccatcacggttaagcctcttgagggcggcatcgtcgagttgaatttcgatctcaagggcgagtccgtcaacaagttcaaccgtctcaccctcagtgagttgcgtgcggcagtcgatgcgatcaaggccgatgcatcggtcaagggcgtgatcgtgaccagcggcaaggacgtgttcatcgttggtgccgacatcaccgagttcgttgacaacttccagctgcccgacgaggaactgatggcgggcaacctcgaagccaacaagatcttcagcgacttcgaagacctggacgtacccaccgttgccgcgatcaacggcatcgccctcggcggcggcctggagatgtgcctggccgcggacttccgcgtgatgagcgcgaccgccaaggtcggcctgccggaagtcaagctgggcatctacccgggcttcggcggcaccgtccgcctgccgcgcctgatcggctgcgataacgccgtcgagtggatcgcctcgggcaaggaaaacaaggccgaggacgccctgaaggtcggcgccgtcgacgccgtggtcgctcccgagcaactgcaggccgctgctctcgacctggccaagcgcgccgtcgccggcgagctggaccacaaggcacgtcgccagccgaagctggaaaagctgaagctgaatgcaatcgagcagatgatggccttcgaaaccgccaagggcttcgtcgccggccaggccggtccgaactacccggcgccggtggaagccatcaagagcatccagaaggccgccaacttcggccgcgacaaggcgctggaagtcgaagccgccggcttcgtcaagctggccaagacctcggtcgcgcagagcctgatcggcctgttcctgaatgaccaggaactgaagaagaaagccaagaaatacgacgaagtcgccaaggacgtgaaactggccgccgtgctcggcgccggcatcatgggcggcggcatcgcctatcagtcggcgctcaagggcaccccgatcctgatgaaggatatccgcgaagagggtatccagatgggcctgaacgaggccgccaagctgctcggcaagcgcgtcgagaagggtcgcctgaccccggcgaagatggccgaggcgctcaatggcatccgtccgaccatgtcctatggcgacttcggcaacgtcgacatcatcgtcgaagccgtcgtcgagaaccccaaggtcaagcaagccgtgctcgccgaagtggaaggcgcggtgaaggaagacgcgatcatcgcctccaacacctcgaccatctccatcagcctgctggcccaggcgctgaagcgtccggaaaacttctgcggcatgcatttcttcaacccggtgcacatgatgccgctggtggaagtgatccgtggcgagaagaccggtgaaaccgccatcgccaccaccgtcgcctacgccaagaagatgggcaagagcccgatcgtggtcaacgattgccccggcttcctggtcaaccgtgtgctgttcccgtacttcggcggcttcgccaagctgctgagcttcggcgtcgacttcgtgcgcatcgacaaggtgatggagaagttcggctggcccatgggcccggcctacctgtccgacgtggtcggcatcgacaccggccaccatggccgcgacgtcatggccgagggcttcccggaccgcatggcggtcgagggcaagaccgccgtcgacgtgatgtacgaggccaaccgcctgggccagaagaacggcaagggcttctacgcctacgagaccgacaagcgcggcaagccgaagaaggtcaccgatccgcaggcctacgaagtgctcaagccgatcgtggtcgagcagcgcgaagtgaccgacgaggacatcgtcaacttcatgatgatcccgctgtgcctggaaaccgtgcgttgcctggaagacggcatcgtcgagaccgctgccgaggccgatatgggcctgatctacggcatcggcttcccgcccttccgtggtggtgctctgcgctacatcgattcgatcggtgtcgccgagttcgtggccctggccgacaagtacgccgagctgggcgcgctgtaccacccgaccgcgaagctgcgtgaaatggccaagaacggtcagaaattcttcggttaatcgcggaacgactagagcgagagtgaatttatgagcctgaatccgagagacgtcgtcattgtcgacttcggccgcaccccgatgggtcgttccaagggtggcatgcaccgcaacacccgcgccgagaccatgtcggcgcacctgatcagcaagctgctggagcgtaacccgaaggtcgacccggccgaagtggaagacgtgatctggggctgcgtcaaccagaccctggagcagggctggaacatcgcgcgcatggcgtcgctgatgacccagatcccgcacaccagcgccgcgcagaccgtcagccgcctgtgcggttcgtcgatgagcgcgctgcacaccgccgcccaggcgatccagaccggcaatggcgatgtattcgtcatcggcggcgtggagcacatgggccacgtcggcatgatgcatggcgtcgacccgaacccgcacctgtccctgtacgccgccaaggcctcgggcatgatgggcctgactgcggaaatgctcggcaagatgcacggtatcagccgtgaggcgcaggacaagtttggcgcgcgttcgcaccaactggcctggaaggccacccaggaaggcaagttcaaggacgagatcatcccgatggaagggtatgacgagaacggtttcctgaaagtcttcgacttcgacgagaccattcgtccggaaaccaccgtcgagaccctggccgagttgaagccggcgttcaatccgaaaggcggcaccgtgaccgcggggacctcctcgcagatcaccgacggtgcctcctgcatgatcgtgatgtcggcccagcgcgcccaggacctgggcatccagccgatggcggtgatccgctccatggccgtggcgggtgtcgacccggcgatcatgggctacggcccggtgccgtcgaccaacaaggcgctcaagcgtgccggcctgaccatcgccgacatcgatttcgtcgaactcaacgaagccttcgccgcccaggccctgcctgtgctgaaggacctcaagctgctcgacaagatggacgagaaggtcaacctccacggcggcgccatcgccctgggtcacccgttcggttgctccggtgcgcgcatttccggcaccctgttgaacgtgatgaagcagaacggcggtacccttggcgtgtccaccatgtgcgtgggcctgggacagggtatcaccaccgtcttcgagcgcatctaagcgttcgtcgaaggggaaagccggggcctcgtgccccggctttcgtttttcagtgtcagtcgtttccggctgtatcgagcgaatgacgccccgggagcgcgggtttgcctattgtgcgatccgtgcctataccgggctgttgtatgtcggcattgtgccgttgttttccgattttcgagacaaggtaaggaacatggacctgcaggctgggctctatcgtcattacaagggacagaactaccgggtcctgggtgtcgcgcgacattcggagacggaagaggcgctggtgatctaccaggcgctgtacggcgaattcggtctctgggtgcgtccgctggagatgttcaccgaggccgtggaggtcgatggcgagtgggtgccgcgcttcgtcctggtgagtcccgaggccgatcccctgggcttgcagaaagctcccggcggggaagaccgcgcttgaccttggctcgttcgccactatatatagcggtgccgcgctagtcgctccctcctttatattcatcttttcgacgcaggaaccttccgatccatgggtaaatcgctggtcatcgtggaatccccggccaaggccaagaccatcaacaagtacctgggcagccagtacgtggtgaagtcgagcatcggccacatccgtgacctgcccaccagtggttcgtcgagttccaaggagccggcggccaagggccgcaagagcgcctccgaggcgccggcgctgtcaccgaaggagaaggccaggcgccaactggtctcgcgcatgggggtcgaccccgagcatggctggaaggccaagtacgagatcctgcccggcaaggaaaaggtcatcgacgagctgcgccgcctggccaaggacgccgacaccgtctatctcgcgaccgacttggaccgcgaaggggaggccatcgcctggcacctgcgggaagccatcggcggcgacgaaagccgctacaagcgcgtggtattcaacgaaatcaccaagaaggccatccaggaggccttctcccagcccggcgagctcgatatcaaccgggtgaacgcccagcaggcgcggcgtttcctcgaccgcgtggtcggctacatggtctcgccgctgctctggcagaagattgcccgtgggttgtccgccggccgcgtgcagtcggtggcggtgaagctggtggtggagcgcgaacgcgagattcgcgccttcgtcccggaagagtactgggaagtgcatgccgacctcggtaccgccaagggcgccaacgtgcgcttcgaggttacccgtgagaagggcgaggccttcaagccgctcaacgaagcccaggccatggcggccctggaaaagctcaaggcctcggcctatagcgtcgccaagcgcgaggaccggccgacctccagccgaccctcggcgccgttcatcacttccaccctgcagcaggcggcgagcaaccgcctgggcttcggggtgaagaagaccatgatgatggcccagcgtctctacgaggccggctacatcacctacatgcgtaccgactcgaccaacctgtcggccgatgccattggcatggtccgcggtttcatcgaggacgagttcggccagaagtacctgccgggcaaggccaacgtctactcgagcaaggagggcgcccaggaagcgcacgaggcgatccgtccttccgacgtcaacctcaagccgacccagctgtccggcatggagcgtgacgccgagcgcctgtacgacctgatctggcgccagttcgtggcgtgccagatgaccccggccgaatacctctcgaccagcgtgagcgtcaccgccggcgatttcgagctgcgcgccaagggccgcatcctcaagttcgacggttatacccgggtactgccgcagcagagcaagccgggcgaggacgacgtcctgccggaaatgaaggaaggcgagaacctcaagctgatcaagctcgatccgagccagcacttcaccaagccgccggcgcgctactccgaagcgagcctggtcaaggaactggagaagcgcggtatcggccgcccctcgacctacgcggcgatcatctccaccatccaggagcgcggctacgtaaccacccacaaccgccgcttctatgcggagaagatgggcgacatcgtcaccgatcggctcaacgagagcttcgccaacctgatggactacggtttcaccgccgggatggaggagcatctcgacgacgtggcccagggcgagcgcgactggaagcacctgctcgacgagttctacggcgatttcaagaagaagctcgaggtggccgaagtcagcgagaaggggatgcgcgccaaccagccgaccctgaccaacattccctgccgcgagtgcggccggccgatgatgattcgtaccgcctccaccggcgtgttcctcggctgctcgggctacagcctgccgccgaaggagcgttgcaaggcgaccgtcaacctgattcccggcgacgagatcgccgcggacgacgagggcgagtccgagtcgcgggtgttgcgtggcaagcatcgctgcccgatctgcagtaccgcgatggacgcctacctgctggacgagaaacacaagctgcatatctgcggcaacaaccccgactgtccgggctacgagatcgaggaaggccagtaccggatcaagggctacgaagggccgagcctggaatgcgacaagtgtggcagcgagatgcagttgaagaccggccgtttcggcaagttcttcggttgcaccaatccgacctgcaagaacacccgcaagctgctgaagaatggcgaggcggcgccgccgaagatggacgccatccgcatgcctgaattgaagtgcgagaaggtggacgatatctacgtgctgcgcgacggcgcttcgggcatgttcctggccgccagccagttcccgaagaaccgcgagacccgcgcgccgttggtgagcgagatcatcccgcacaaggccgagctggatcccaagtaccattacctctgcgacgccccgcagaaagacccggacggccgtcccgcggtgatccgtttcagccgcaagaccaaggagcaatacgtgcagtccgaggtcgatggcaagcccaccggctggcgcgccttctacgatggcggcaagtggaaggtcgaagacaagcgctgatggatggcgcgcccgcttgcatggggcgcgcttatactgcgcgaaggccgggcgctgacctggcctgcgctccgcattccttccagttttaatcgggagtaccggcatggcccaagagctttatacccgcaccaaccagaagctgtatttcgccgggttggctctggaggcctggaagcgagccgatgccgagcgggcgatgaatgcccaggcgatcatccagggggagcgcgagtcggcgctgttccacctttatggcgcagtgctcggtgtatgccatgagatcgccggttactaccgtctgccgcaggctgccgctcctcgcgtggatgcattgctgaatgccgaagtgctggcggccgcgcccagccccgagctggctgaactggtggagttggcgtcgcagccggaaacctggctgggccagttgctgggcgcctactccgagctgttcctgccgccgcgaccgaccaaggcagcgaagatcgaccccagcacaccgttgatcgttgccgtgagtatcgacgaagaagcccccttgctttctcgcgaaaccctcgaggaatggcggcagtcgctgaagcaattggtcctgcgttttcgcgagagcctgacggagctgtaacgccgtcgtcattcgccgatcagcggtaggacattttcctaccgttccactcggttgatttgccagcaaaaaaatttagcggatgccgtccgggcgctctggaaccgccgttacaggcgcgagaggggaaccggaaggcggatgcgggctagggatgcactggatgggctgttacaatgtcgcgtcttcgtagagagcgtctgtcatgccaacatccttccttgaaatcgtagaaatgcccgacgggcgcatcgtgctgcgtcgcgccgatgacgaggaggcgttggtgactctggagttctccggggacgcgaagaatttcctgcaaggccagcatgtcgaagtggccaaggccatgttcaatgtcggcgtgcaaatggccggtcgtcttgccgagggcgagatggaacacgacgaaggcccccgcgtcctgcactgaacgctgtcccccgccgttttttcaacccagacgaatattcaggctctgtgcttggcccagttgggcggcgcgggacagttgcttgcgcgccgcccggctcagcggttccagccaactgaccacggtgtggctgcggcccaggcgcaaggcctcgcaactgagcgccagggcagcggcgttgtccttcgcctgcagtagcaggatgcgctcgcggttcaggccggcgcggcgcagccattcatgggtcaggctcgccggcggagcgatcagggtcagccagcgggcatcctgttcctcgctgagctcgcggagaatcggtgcgagcagggtcaggcagtgccccggcaggccgctgagcgaaagttcgctaaaggcagcgggttcctcgatggaggtgctggaagggctgtcgatgacatcgtcgagcaagggtgcgccgttgctagcccagaacgcttcctggaacagtggcaactgggcgctgggcagcgagtgggaggtctgcatggtatctcctgtcagcgccggatcacgccgacgctcaagccttcgatgatcagttcctgctccttcagatcgacttcgatcggagcgaactcagggttttccgccagcagccagaccttgctgccttcgcgcttgaagcgtttcaccgtgacctcctcgccgatccgcgcgaccaccacctggccgttgcgcgcttcgcgggtgacgtggacggccagcaggtcgccgtcgaggatgccgatgtccttcatgctcatgccgcgcacgcgcaacaggtagtcggcgcgaggattgaagaaggcgggattgatacggcaggattcctcgatgttctgttcggcgaggatcggtgcgccggcggcgacccgtccgatcaccggcaggccctcatcgtcgttggcggcatgcggttcgaagccgggaatgcggatgccgcgagaggcgcccggagtcatttcgatggcgcccttgcgtgccagcgccttgaggtgctcctcggcggcgttcggcgacttgaagccgagttcctgggcgatttccgcccgggtcggcggaaagccgtggtcttccaggcagcgcttgatgaaggagaggatctcggcttggcggggcgtcagcttctgcatgtcgtcgctctgtgtttttatccagtgactgggattatatacagtgagcggggcgtggcaatgattttccgcatgacatttcgtcctgcgtcacgatgaagttggccagtgtcttgcttccgtttttcgggacttctttgtaattttcctgactggtgcgtcatctgccgcttgacaagggatgtggctgaaacgtatgtttcaaacaagtgtttgtcaggcggagaaaccatggcccagtcggaaaccgtcgaacgcattctcgatgcggcggaacagctgttcgcggaaaaaggcttcgccgaaacctcgttgcgtctgatcaccagcaaggccggggtcaacctggcggcggtgaattatcacttcggttcgaagaaggcgctgatccaggcggtgttctcgcgcttcctcgggccattctgcgtcagcctggaaaaggagctggatcgtcgccaggccaagcccgaggcccagcacgccaccctggaggacctcctgcacctgctggtgtcccaggcgatggcggtgaagccgcgcagcggcaacgacctgtcgatcttcatgcgcttgctcggcctggccttcagccagagccaggggcacctgcgcaagtacctggaggaggtctacggcaaggtcttccggcgctacatgctgctggtcaacgaggctgcgccgaagctgccgcccatcgagctgttctggcgcgtgcacttcatgctcggcgcggccgccttcagcatgtcggggatcaaggccctgcgggcgatggcggaaaccgatttcggcgtgaacacttccaccgagcaggtgatgcacctgatggtgccgttcttcgctgccggcatgcgcgccgagagcggcatcgacgatccgctgctggccggggcgcaactgcgcccgcggaacaagacgcccgccaaggcctgattgcagacggcgccccagggcgccgtttttctttctcctttctctgtgctccgggcggaactccatgcgccgggccggctccattggcaggcgcgcggtaccgccccgggacttaagtctttctgccgggtgcagtacagtgtgcgctgtctgaggcccgtgacggcgggcttcgctgatttccaggccataggactcttcatgcaaggctctctgatgctcgacatcggcggcacctggctgaccgccgaggaccgccaaatcctgcgccaccccgaggtgggcgggctgatcatcttcgctcgcaacatcgagcatcctgcccaggttcgcgaactgtgtgcggccattcgcgccatccgtcccgacctgttgctggccgtcgaccaggaaggagggcgcgtgcagcgcctgcgccagggcttcgtgcgcctgccggcgatgcgcgcgatcgccgacaaccccaatgccgaagagctggccgagcattgtggctggctgatggcgaccgaggtgcaggcggtcggcctcgacctgagtttcgcgccggtgctggatctcgaccaccagcgcagcgccgtggtcggtagccgcgccttcgagggcgacccggagcgtgccgcgctgcttgccggtgctttcattcgcggcatgcatgccgccgggatggccgccaccggcaagcattttcccggtcacggctgggccgaggccgattcccatgtggcgattcccgaagacgcgcgcagtctcgaggaaatccggcgcagcgacctagttccgttcgcccgcctggccggacagctcgacgcgctgatgccggcccatgtcatctatccgcaggtcgacccgcagcccgccggcttttcccggcgctggttgcaggagatcctgcgcggcgagctgaagttcgacggggtgatattcagcgacgacctgtcgatggccggcgcccatgtggtcggcgacgccgccagccgcatcgaggccgccctggccgcgggctgcgacatgggcctggtgtgcaacgaccgggcttccgccgagctggccctggctgccctgcaacgcctgaaggtgaccccgccgtcgcgtctgcaacgcatgcgtggcaagggctacgcgaataccgactatcgccagcagccgcgctggctggaagcactgtccgcgttgcgcgccgcgcaactgattgattgagggagctgtcgatgagtgtctacgcgattatcggaggaaccggcctgacccagctggaagggctgacgctgagcgagtccctgccgatcgaaacgccgtatggcgcgccgtccgcgccgctccagcgtggccgctacgccgggcgcgaggtgctgttcctggcacgtcacggtcatccgcaccgcttcccgccgcaccaggtgaactaccgcgccaatctctgggcgctgaagcaggcgggtgccgaggcggtgatcgcggtcaacgcggtgggtggcatccatgcggcgatgggaacggggcacctgtgcgtgccgcaccagttgatcgactacacctcgggacgcgagcacacctatttcgccggcgatatcgagcatgtcacccatatcgacttcagccacccctatgacgagccgttgcgccagcgcctgatcgaggcgttgcgtgcgttggggctggcgcacagcagccatggggtctacgcctgcacccaagggccgcgcctggaaacggtggcggaaatcgcccggttggagcgggacggcaacgatatcgtcggcatgaccggcatgcccgaggcggcactggcccgcgagctggacctgccctacgcctgcctggcgctggtggtcaatcccgcggcgggcaagtcggcggggatcatcaccatggccgaaatcgaacaggcgttgcacgatggcatcggcaaggtgcgcgatgtgctggcgcgggtcctggccggctaggcggccatcgcaacgaaaaaaaggccgctattgcggcctttttcgctattgcgcaggaggtgcggcgtcgaagccgccttcgacggggggcgcgtccgccggtgcctgctgttcttccatttccatgggattgggggcggcgggacgggcgccgaccggcaccaccttgatcaggatgcccaggctcggatggtcgagataggtcagttcgccattcttcagccgcgtgccctgcctgatgtgctggctgccggcgaggaaaccgtcgtcgccgaagcgattgacccagaaatcggcctccatgtcgacgaagcgcacctggctgagggtcagcgtaccttccaccgggaaatgatgatcctgttcctggccttcgctgagggcgatcttcaccggggtctcgccgatgtcctggcgccaggccttgtgcagcagcacggtgtagccgttgtcctggctgagcttggcgagctggttgtcgagcgcggtggcgcgcagggcgtcgctggccagcggctgtgcgccggtggcccagtcgtccggggccggctggctggacggcacggcatcgccggcctggcggaacaccaccagttccacctggtagggaccgccggcgaatgccgcgggggcggccagtgagagcagcagggcaaggcaacggaacaagcgcataggctaatccttaggtggtttgcggtgtcaggcgctcgaacagcgcctccagggtattgaagcgttcttccggtcgttccatgggcacctggaagcggaacagggttgcgccttcgaacttgtagcggttcggttggccctggatcagcttgatcaataccagcgggtcgacctgggtatcggcggcgaattctatacgaccgccctgcggtccggcatcgaccttgagtattccaagtttttccgcctgcagtttcagaagggtcaggcgcatcaggttcttcgccggatcgggcaggagcccgaagcggtcgatcatctccacctgcaactcgcgcaaaccttcctcgtcaggggcgttggcgatgcgcttgtagaggatcagccgggcatgcacgtcgggcaggtaatcctcggggatcagcgcaggcacccgcaggttgacctccggcccgccgcccagtggctgctcgaggttcggttgctcgcccttgcggatggccttcaccgcccgttcgagcatttccatgtagagggtgaagccgaccgcctggatctgcccgctctggccgtcgccgagcaactcgccggcgccgcggatctccaggtcgtgggtggcgaggacgaagccggcgcccaggtcctgggcgttggcgatggcttccaggcgtttctcggcgtccggggtcatctgacggcgcggcggtgtcagcaggtaggcgtaggcctggtggtggctgcgaccgacgcggccgcgcaactggtgcaactgggccaggccgaacttgtcggcgcgctcgatgaggatggtgttggcgctgggcacgtcgatgccggtctcgatgatggtcgaggccaccagcacgttgaagcgtttgtggtagaagtcgctcatcacctgttccagctcgcgctcgtgcatctgtccgtggccgatgccgatgcgcgcctccgggaccagttcggcgaggtcgcgggcgcacttctcgatggtcttcacttcgttgtgcaggtagtacacctggccgccgcgcagcagttcgcggagcagcgcttccttgattaccgcgttctgctgctccatgacgaaggtgcgcaccgacaggcggcgcgccggcggcgtggcgatgatggacaggtcgcgcatgccggagacggccatattcagggtccgcgggatcggcgtggcggtgagggtgaggatatccacttcgctgcgcagggccttgagctgctccttctggcgcaccccgaagcggtgttcctcgtcgatcacgaccaaccccaggttggcgaacttcacgtcttcctggagcagcttatgggtcccgatgaggatgtcgatcttgccttcggccagtagccgcgcggcgttctcgacttccttggcgctcttgaagcggctcatcacctcgacgctcaccggccagtcggcgaagcggtcgcgaaagctgttgtagtgctgctgggcgagcagggtggtgggcaccagcaccgccacctgcttgccgctatgcacggcgacgaacgccgcgcgcatcgccacttcggtcttgccgaagccgacgtcgccgcagaccaggcggtccatgggcctgggcgcgagcatgtcggcgaccaccgcctcgatggcgctttgctggtccggcgtctcctcgaacgggaagccggccgagaaggtcgcgtagtcggcctgcggatccttgaacgcgaagccttcgcgggcggcgcggcgggcgtagatgtcgagcagttcggcggcgacgtcgcgaacctgttcggcggccttgcgcttggccttctgccaggtttccgagccgagccggtgcagcggcgccagggcgtcgtcggcgccggtgtagcgggcgatcaggtgcaggttggcgaccggcacgtagagcttggcgtcctcggcgtattgcagcatgaggaattccgcctgctggttgtccacctcgagggtgatcaggcccaggtagcggccgacgccatggtcgatgtgcaccaccggcgcgccttcgcgcagctcggtgaggttcttgatcaccgcgtcgccgccgtcgcgggtcttttcccggcgccggcgctgcatgacgcgctggccgaacagcgggctttcggcgaccagggcgagggccggatggtccagcagcaggccctcgtccagcggcgcgatgctgatcgccaggcgtgcctggctggcgaggaaggccggccagccgtcgacttcctcggggcgcagcttcagtcgggccagcagctccagcaggacttcccggcgtccggccgattcggcgcagaacagtacgcggccggggaactcctcgatgaaccggcgcagcgcggccagcggctcggcggccttggcttcgatcgccaggttcggcagcggcagggccgggaagcgctcgcgcccgacgcccggctcgacgtcctcctggctggcgaccacccgtggccagttcttcagccgggcgaagcagtcttccaccggaaggaacacttccgccggcggcagcaatggccgttccggatcgacccggcggtcctcgtagcggctgcgtacgtcattccagaactgctccgcggcctgttcgatgccgggcagggagaacacctgggtgtcttgcggcaggtagtcgaagagggttgcggtttcctcgaagaacagcggcaggtagtactcgattcccgagggtgtcaaaccgctggcgaggtcctggtagatcgggcagcgccggtagtcgacgtcgaagcgctcgcggaagcggccgcggaagccggtgaccgcttccttgttcagggggaattcgcgtgccggcagcaggcggatcgactcgaccttgtcgatggagcgctgggtctccgggtcgaaggtgcgcagggtctcgatctcgtcgtcgaacaggtcgatacggaagggcaactcgctgcccatcgggaacaggtcgatcagcgcgccgcggacggcgaactcgccgtgctcgtagaccgtgtcgacgcagcggtagccggcgccttccaggcgcaggcgcatccgctcgacgtcgagtttctggccgacgtcgaggaccaggctgctgccgagcaggaagcgggtcggcgccaggcggtgcaaggcggtggagatcggcaccaccagcacgccgtgcttgagctgcggcaactggtagagggcggcgatgcgctgggaaatgatgtcctggtgcggcgaaaagacgtcgtagggcagggtttcccaatcggggaaatgcaataccggcaggtcgggggcgaagaaccgcagttcctgttccaggcgttcggcattctggctgtcggcggtcagcagcagggtgaagcgcttggcggaactggcggcctcggcgacagccaggctcagcgcggcaccggggaggttgccccagtgttgcttgccggcgctggccggcaggctgggaagacgcagtacggacacgggcaagctgggctccggtcgggaatttgacccgccggattgtaactttcccgactgctggatgtcagtcttccgactgctgcagattgccgagcctggccggcgcggtcataatgtagccccttttttcatcccctacatgtggaaggtattgcccgtgactcagaagcccgaccagtgtctcggtgaatggatcgatcgtgaagccatcgcggaagccatgatcccgctgattggccagctctaccgcaataacaatgtggtgacctcgatccatggccgtggtctgatcaaccgctcggtgatcgcgatcatgaaggcgcatcgtttcgcccgtcatcgcatggctgatgacgccgagctgtcggttcacgagacgttcccgatcctcaaggcgatgagcgagctcaagctgggcgccgcttccgtcgatctgggcaagatggtcgccaagttcaaggcagaaggtaacggccgcagcatcgaggacttcgtcaaggccgagctggccgaggtggtcggcaagcagaacggcgatgcccgcgaaggcaccgacgtcgtgctctacggcttcggccgcatcggccgcctgctggcgcgcatcctgatcgagaagaccggcggcggcgacggcctgcgcctgcgcgcgatcgtcgtgcgcaagggtgccgagaacgacctggtcaagcgggccagcctgctgcgtcgggactcggtgcacggtccgttcgacggcaccatcaccatcgacgaagaaaacaacacgctgaccgccaacggcaacctgatccaggtgatctactccaacgatccggcgtcgatcgactacacccagtacggcatcaagaacgccctgctggtcgacaacaccggcaagtggcgcgacgccgaaggcctcggccagcacctgaagtgcccggggatcgatcgcgtggtccttaccgctccgggcaagggtgcgctgaagaacatcgtgcacggtatcaaccacaccgacatcggcgccgacgacaagatcatctcggccgcctcctgcaccaccaacgccatcgtgccggtgctgaaggccgtcaacgaccagtacggcatcgtcaacggtcacgtcgagaccgttcactcgtacaccaacgaccagaacctgatcgacaacttccacaagggcagtcgtcgtggccgcagcgcgccgctgaacatggtgatcaccgagaccggtgccgccaccgccgcggccaaggccctgccggtgctgaaaggcaagctgaccggcaatgcgatccgtgtgccgacgccgaacgtgtccatggcgatcctcaacctgaacctggaaaaggccaccacccgcgaagagatcaacgagtacctgcgccagatggccatgcactcggacctgcagaagcagatcgacttcgtcagctcccaggaagtggtctccaccgacttcgtcggttcgcgccatgccggcgtggtggacgccgaggcgaccatctgcaacgacaaccgtgtcgtcctgtacgtgtggtacgacaacgagttcggctacagctgccaggtagtgcgcgtgatggaagacatggctggggtcaacccgccggccttcccgcgttgatgcgcaaggcgtagaggaaaacgggagctctcgggctcccgtttttcatttctgtggataaccagaacaagaaactactcacttcgatttagggtttttcaatggatggtcaacatctgcaccagggcgagctgaagcgtggcctgaagaatcgccacatccagttgatcgcgctgggcggggcgatcggcaccgggctgttcctcggctcggcgggcgtcatcaagacggccggcccgtcgatgatcctcggttacgccattggcggcttcatcgccttcctgatcatgcgccagctcggcgagatgatcgtcgaggagccggtggccggctccttcagtcacttcgcacacaagtactggggcggattcgccggtttcctttccggctggaactactgggtgctgtacatcctggtgggcatgtcggagctgaccgcggtgggcaagtacatccagtattggtggccggacgtgccgacctgggcgacggcggcggcgttcttcgtgctgatcaacgcgatcaacctggccaacgtgaaagccttcggcgagaccgagttctggttcgcgatcatcaaggtagcggcgatcgtcggcatgatcctgctcggtatctacctgctggtcggcggcggtggcggaccgcaagcctcggtgagcaacctgtgggaccgcggcggcttcttccccaacggtctcagcggcctggtgatgaccctggcgatcatcatgttctccttcggggggctggagttggtgggtatcaccgccgccgaggcgtccgagccgcggaaggtgatcccgaaggcgatcaaccaggtgatctaccggatcctgatcttctatatcggcgccctggcggtgctgctctcgctgtatccatgggaccagttggtggagaccatcaacgcttccggcgacgactacagcggcagcccgttcgtgcagatcttctcgttgatcggcagcggcaccgcggccaacatcctcaacttcgtagtactcaccgcggcattgtcggtctacaacagcggcgtctactgcaacagccggatgctctacggcctggccgcccagggtgacgcgccgaaggtgctgatgtcggtggaccgccggggcgtgccggtgctgtcgatcctggtctcggcgctgatcaccttcctctgcgtgatcgtcaactacgtattgccgcacaaggcgctggagctgctgatgtcgctggtggtggcggcgctggtgatcaactgggcgatgatcagcctgtcgcacctgaagttccgcgcggcgatgaagcgccagggcgtggacaccttcttcaaggcgctctggtcgccgttcagcaactacctgtgcctggccttcgtggtgttcatccttggcatcatgctgatgatccccgggatcaacatctcggtgtacgccattccattctggctgctgctgatgtggttgtgctaccgggtcaagctgtcgctggcggaaaggcgcgggctcggccagcaggcctgagcctgcgggtggcgcaggacgggagcttcggctcccgtttttcatttcgcacgggcatgtttttctgtcgttttctgttacgcgtttcaagacccggtgtgcggcttgggtggctcccggggaggtggctctttataatcccggggttaccttgcggggccattcatcaatcgtgccaattcagtacgttgcgcgcgatgatggtcattttctgacttgggcctcgtcttttctgtccacgaccactaggcactagacatgatcaagataaaacgtggcctggacctgcccatcagcggcgcccccgaacagcgcatcgaggcagcacgcccggtacgcagcgtggcgttgatcggtttcgactaccacggcatgaagccgaccatggcggtgcaggtaggcgaccgggtgaagctggggcaggtgctgttcaccgacaagaagaatccctccgtcagctataccgcacccggcgccggtgtggtcagtgccatccatcgtggcgagaagcgcgtcctgcaatcggtggtcatcgatctcgacggcgacgagcaactggagttcgcccgttatcccgctgacaaactcgccacgctgagcgccgagcaggtccgcgacaacctgttgcagtcgggcctgtggaccgcgctgcggacccggccgttcagcaaggtgcccgatcccgagtccagccccagttcgattttcgtcactgccatcgatacccagccgctggccgccgatccgcaggtggttatcgcggagcagggcgaggccttccaggccgggctgacggtgctcgggcgcctggcccgggtgttcctgtgcaaggcggaaggcgtttcgctacccggcgaggcgctctccggcgtgaccgcgcaagcattctccggtccgcatccggcgggcctgcccggcacccatatccacttcctcgacccggtgggtgccggcaagagcgtgtggaacctgaactaccaggacgtgattgccatcggcaagctgttcacgaccgggcaattgtggaccgagcgggtgatcgccctggccggtccggtggtggaaaagccgcgtctggtgcgcacccgcttgggcgccaacctcgacgaactggccgccggccagttgcagccgggcaacaaccgactgatctccggctccgtgctgggcggtcgcaccgcccatggcgcctacgcctacctggggcgctaccacctgcagttgtcctgtctcaaggagggcgaccagcgcgagttcctccactacctgcgcgccggggtggaaaagcattcgctgctcaacgtgttcgtctccaggctgctcggcggcaagcgctttgccttcaccaccagcaccaacggcagcccacgggcgatggtgccggtaggtaactacgaggcggtgatgccgctggatatcctgccgactcaactgctgcgctacctgatcgtcggcgacacggaaatggcccagaagctcggcgccctggaactcgacgaagaggacctggcgctgtgcagctacgtctgcgccggcaagtacgaatacggcccgattctgcgggacaacctggcacgcatcgagcaggagggctgagccatgggtttgcgtaacctgctcgacaaggtcgagcatcatttcgagaagggcgggcgctacgagaagtggtacccgctgtacgaagccgtggacaccttcctctatcgtcccggcagcgtcacccgcaccactgcacacgtgcgcgacggcatcgacctgaagcgcatgatgatcatcgtctggctgtgcaccttcccggcgatgttcttcggcatgtacaacgtcggccaccaggccaacctgatcttcgcccagagccccgacctgttgagcgcccaggatggctggcgcttcgccctgatcggcgcgctggccgggttcgacccgaacagcctgtgggattgcctggtccagggcgccgcgtacttcttgccggtgtacctgaccaccttcatcgtcggcggtttctgggaggtgctgttcgccagcatccgccgccatgaggtcaacgaaggcttcttcgtcacctcggtgctgttcgccctgaccctgccgccgtccgtcccgctgtggcaggtagccctggggatcagcttcggcgtggtgctgggcaaggaagtgttcggcggcaccgggaagaacttcctcaatccggcactggtcggccgggccttcctgttcttcgcctacccggcgcagatgtccggcgacgcggtatggacctcggtggacggcttcgccggcgccacctcgctgagcctggccgccgccggcggggtggacaacatcctcggccacggcctgacctggatggatgccttcctcggccacatgcaggggtcgatgggtgagaccagcaccctggcgatcttcatcggtggcgccgtgctgctgctgacccgcatcgcctcctggcgcatcgtcgccggggtgatgctggggatggtcgccatgagctacctgttcaacgccatcggctcggccagcaacccgatgttcgccatgccctggtattggcacctggtcaccggcggcttcgccttcggcatgatcttcatggccaccgacccggtctcggcgtccatgaccgataccggcaagtggctgttcggcgccctgatcggagtgatggtcatgctgatccgggtggtcaacccggcgttcccggaaggcatgatgctggcgatcctgttcgccaacctgttcgcaccgctgatcgaccatttcgtcgttcaggccaacatcaagcggaggctggcgcgcaatggctaatcaagaatccaccacccgcacactgctggtagccctggtggtgtgcctggtcagctcggtgttcgtcgccggcgcggcggtggcgctgaagccgacccaggcggaaaaccgcctgctcgacaagcagcgcagcatcctcgccatcgctggtctcggcgagccgggcatgtccggcaaagaggtcaaggcgctgttcgacagtcgcatcaccgccaaggtggtcgacctccagagcggcaccttcagcgatgcccaggacccgctcggctacgacccgctgaaagcggccaaggacccggcgctgtcggatgcgctgcccgccgccgaggacatcgcctcgatcaagcgccgcgagcgctataccacggtctacctggtggagaccgacggcaagctcgacaccctgatcctgccggtgcgcggctacggtctgtggtcgaccctctacggcttcctggcgctcaagggcgacctcaatacggtcgccggcttcggcttctaccagcatggcgagacccccggtctcggcggcgaggtcgacaatccgaaatggaaggcgctgtgggtcggcaagaccctctacgacgcccagggcgatcttgccgtacagatcatcaagggctcggtggacccgcaatcggcgaaggcgacccaccaggtcgacggcctggccggcgccaccctgaccagcaagggtgtcgacaacctgctgcatttctggctcggcaaggacggtttcgacgccttcctcgccaatctgcgcaaaggggaggcgtgatggctgctcaacccacgatccgcgaagtcctgttcaatccggtcttccagaacaatccgatcggcctgcagatcctcgggatctgctcggcgctggcggtaacctcgaacctgaagaccgctaccgtcatggccatcgccctgaccctggtgaccggcttctccaacctgttcatctcgatgatccgccggcagattcccagctcgatccggatgatcgtgcagatggtgatcatcgcctcgctggtgatcgtcgtcgaccaggtgctcaaggcctatgcctatagcctgagcaagcagctctcggtgttcgtcgggctgatcatcaccaactgcatcgtgatgggccgcgccgaagccttcgccatggccaacccgccgctcgtgtcgttcttcgacggcatcggcaacggtctcggctacagcgccatgctgctggtgctgggcttcgtccgcgagctgttcggcgccggcaagctctacggcatcagcgtgttgccgacggtcaacgatggcggctggtaccagccgaacggcctgctcctgctgccgccttcggcgttcttcctgatcggcctgatcatctgggccctgcggacctggaagaaagaccaggtcgaggccccgacctacaagatggccccgcaggtatccagcaaggaggcttactgatggagcactacatcagcctgttcgtgaaggccgtgttcgtcgagaacatggcgctggcgttcttcctcggcatgtgtaccttcatcgccatctcgaagaaggtggagaccgccatcggcctgggtatcgcggtgatcgtggtgcagaccatcaccgtgccggccaacaacctgatctacacctacctgctcaaggacggcgcgctggcctgggccgggctgcccgaggtggacctgagtttcctcggcctgctcagctacatcggggtgatcgccgccatcgtgcagatcctcgagatgctcctcgacaagtacgtacccagcctctacaacgcgctgggcgtgttcctgccgctgatcacggtgaactgcgcgatcatggccggctcgctgttcatggtcgagcgcgactacaaccttgccgagagcacggtgtacggcgtcggctcgggcttttcctgggcgctggcgatcgccgcgctggcgggtatccgcgagaagctcaagtacagcgacgtccccgagggcctgcagggcctggggatcaccttcatcaccatcggcctgatgtcgttgggcttcatgtcgttctccggcgtgcagttgtaaggagaggcccgtgatcggattcgagattttcctggccatcggcatgttcaccgccatcgtcctgggcctggtggcgatcatcctggtcgcccgcgccaagctggtgtcgagtggcgacgtgaccatccagatcaacggcgagcacagcctgaccgtgccggccggcggcaagctgctgcaaaccctggcggcgaacaacgtgttcctgtcttccgcctgcggcggcggcggcacctgcgcgcagtgcaaatgcgtggtggtcgagggcggcggcgagatgctgcccaccgaggagtcgcacttcacccggcgccaggcgaaggaaggctggcgcctgtcgtgccagacgccggtcaagcaggatatgcaaatccgcgtgcctgaagaggtcttcggggtgaagaaatgggagtgcacggtggagtccaaccccaacgtcgccaccttcatcaaggaactcaccctgcgcctgccggacggcgagagcgtggactttcgtgccggcggctacgtgcagctggaatgcccgccgcacgtggtcgagtacaaggacttcgatatccagccggaatatcgcggcgactgggacaagttcaacatgtggcgctacgtgtcgaaggtcgacgagacggtgatccgcgcctactcgatggccaactacccggaagagcagggcgtggtcaagttcaacatccgcatcgcctcgccgccgccgggcagcgacctgccgccggggcagatgtcgtcctgggtgttcaacctcaagccgggcgacaaggtcaccgtgtacgggccgttcggcgagttcttcgccaaggacaccgaggccgagatggtcttcatcggcggcggcgccggcatggcgccaatgcgttcgcacatcttcgaccagttgcgccggctcaagtcgaaccgcaagatcagcttctggtacggcgcgcgctcgctgcgcgaggccttctataccgaggagtacgaccaactgcaggcggagaatcccaacttccagtggcacctggcgctgtccgacccgcagccggaggacaactggaccggcctgaccggtttcatccacaacgtgctgttcgagaactacctgaaggaccacccggcgcccgaggactgcgagttctacatgtgcggcccgccgatgatgaatgccgcggtgatcaagatgctcaccgacctgggcgtggagcgcgagaatatcctgctggacgatttcggtggctgagcgtttccgtccgcttgccatggccggactggcagcgctggcgctggtcctggccggttgcggcgacaccctggaaagcttcggcggcccgaccatgggcagcacctattcgatcaagtacgtgcgcggcgcctcggcgcccgacgtccagacggcgaaagccgcggtggaggcgatcctcaccgaggtcgaccggcagatgtccacctaccgcgacgactccctggtctcgcgtttcaatgcgctgccggcgcagtcctgcatggagctgccgccaccgatgctggagttgctgcgctacggcggcgagctgtcggagcagagccagggcgccttcgacatgaccgtcgagccgctgatgaacctctggggtttcggtccgcaggcgcgggtggagaaggttcccagcgccgagcagatcgccgcggcgcgccgtgacgtcggccatcgacacctgcgcatcgacggccagcgcctgtgcaaggacgccgccgtacaattggacttcgacagcatcgccgctggctatacggtggacgcggtaggcgaacgcctgaaggagctcggcgtgcgcagctacctggcggaaatcaccggcgagttgaaagccgaagggcgcaagccggacggcacgccctggcgcatcgctatcgaagcgccgcgcgagggccagcgggtcgcccagcaggtactggcgctggacggctacggcgtctcgacctcgggcgattaccgcaactatttcgaagagaacggccagcgctattcgcacaccttcgacccgcgcaccggcgcgccgatcgaccatcacctggcttcggtcacggtgatcgatccgtcgacgcgcaacgccgacggcctgtcgaccctgctgatggtgctcggtccggaggagggctaccgtttcgccgagaagcaccgactggcggcgctgttcgtcagtcgccagggcaacggtttcgacagccgcaccacgccacgctacgagcaactgttcggcaaccaaggagaacgtccatgacctggctactggtcttcgtcatcatgctgctggtggtcttcggcatgtccatcggcgtcatcatgggccgcaagccgatcgccggttcctgcggcggcatcgccaacctggggatcgagaaggaatgctcgatctgcggcggcgaccggcagaaatgcgaggaagccaaccgcgacgaatctgtagtgcccggaaaactcgcctacgacgcgaccaaacgctaatgtgcgacatttcgcacagggcgtaacatatgcccgcctcgaggtcggaccgagccttgcccggcgaatgccgtcgttcgcaccgacccgatgatcgaatcgatccgccgcgcacatgttgtgcagcggctttgccggaggcgccagtgggcgcctcggcctgttctgaggagtacgcatggctgtctacaactacgacgtggtgattttgggcacgggtccggcgggcgaaggggcggcgatgaacgcctccaagtacggacgcaagctggcggtagtcgacagccgtcgcgtggtcggaggcaactgcacgcacctcggcaccattccttccaaggccctgcgccactcggtgaagcagatcatcgagttcaacaccaacccgatgttccgccagatcggcgagccgcgctggttctccttccccgacgtgctgaagagcgccgaccgggtgatctccaagcaggtcgcttcgcgtaccggctactacgcgcgcaatcgcatcgacatgttcaccggcaccgccagcttcgtcgacgaacgcaccgtcgaagtggtgacgccgagcggcgcggtggagcgcctggtcgccgaccagttcgtgatcgccaccggctcgcgcccgtatcgtccttcggacatcaatttcaaccacccgcgggtctacgacagcgacaccatcctgtccctgagccacaccccgcgccggctgatcatctacggagccggggtgatcggctgcgaatacgcgtcgatcttcagcggcctgggcgtgctggtggacctgatcgatacgcgcgaccagttgctcagcttcctcgatgacgagatttccgatgcgctgagctaccacctgcgcaacaacaacgtgctgatccgccacaacgaggagtacgagcgcgtcgaggggctggacaacggtgtcatcctgcacctgaagtcgggcaagaagatcaaggcggacgcgctgctctggtgcaacggccggaccggcaacaccgacaagctcggcctggagaacgtcggcatcaaggtcaacagccgtggccagatcgaggtggacgagaactaccgcacttcggtgagcaacatcttcgccgccggcgacgtgatcggctggccgagcctggccagcgctgcctacgaccagggccgctcggccgccggcaacatcgtcgagagcgacagctggcgcttcgtcaacgatgtgccgaccggcatctacaccattccggagatcagctcgatcggcaagaacgaaagcgaactgaccgcggcgaagattccctacgaagtgggcaaggcgttcttcaagggcatggcccgggcgcagatttccaacgagccggtgggcatgctgaagatcctgttccatcgcgagaccctggagattctcggcgtgcactgcttcggcgaccaggcttcggaaatcgtccacatcggccaggcgatcatgaaccagccgggcgagctgaataccctgaagtacttcgtcaacaccaccttcaactacccgaccatggcggaagcctatcgggtagcggcgttcgacggcctcaaccggcttttttgaaggactccggccggcggcctgagccggccggaggggatgtgctcagcgattcccgagggtggcgctggccaaaccgggaaagtctgtgatcaggctgtccacgccgaagtcggcgagccggcgcatcagcgccggttcgttgaccgtccacaccgagacgtgaagcccctggcgctgggccttgagcaggcgttccggggtgcatagggtccagttcagggcgagcagggcacagccatagtgctgggcgaccttcagcgggtcgagccaggcgtattcggcgaccagcccgcgcgacagctccggggtcagttcgttgagggccttgagcacggtccgcgaaccgctggtgacggtgaccttgtcgcggttgccgaagcgctcggtcagctccctgatccgcgttaccgtccgcgccgcgcgttcgcgcgaggcgctcttcacttccagttgccagtgctcgaacgggcacttctcgaacaactcctccagccgcgggatcggcgtcggccgtacccagccggggccgcccttgcgcgcgtcgtaggtgaccagggtggccgcgtcgtgttcggcgaccttgccgcggcggccggtggtgcgcttcagggtcgggtcgtggatcaccatcagttcgccgtcgcgggacaggtgcaggtccagttcgcaacggttgacgccatgctccaggcagcgctggaagctggccagggtgttttccggcgcttcgcccttggcgccgcgatgtccatagatgagagtcactgtggctccttgttcgagggttgcgcgggattccgcggccgatgatggcgaacgctgtcgagcacccggccgctttcgaaatataccgagaagtcgcggtaatcccagcgcacgatgggcggctggccgaccgcgggatgttcctcgtcggccaggccgaagcgttgcagcacggcttcgcggctttcgccgtgcgcgggcagggcgacccgggtatcgccctgggcgcccagcggaatgctcagggtgtcggcgaacagcggcggggcgaggaggagggagcacagcagtagcgaacggagcatcggcacatctcaggtcgaagaaggtttcaggtcgaagaaggttggcccggctcgccgagcgggccctgtccggcccgtgccaggcggcgctgctgggcctgcttctggaggatatgccgggccagcaactggcgctgtgcgtcgctcaacgcttcgaactcggtgccgatctcgaattcgtcgtcgtgtggctgggcgtggattacccgggcccgcagttcgaggccgaacccctgcggcaacaggaccatgcgcaggacgagcaactggccgaccggcaatgcgcggtcgtggcggaagctgactcccccctcggacaggctgaccttgcgcggttcgccgatctccttgagcaggctctgcaccatgacctggccaagcaggtcgatgcgcttgttcatcaccttcaggtagttggccagcgtgcggtcgcgttcgctgatgtggcgcagaaggtgctgcgactcgtaatccatcaggtggaggtcgctgagcaggctgaacagggtggcccccggctcgctctccaggccgtcttcgacggccccggcagggcgaaattccagtgcgagggtatcttcgatacggtagtattcgcggcggtcatccgcgtcacgagtggacatggcgaacccacggcggcagtgatggtcagagtgtaaggccgccggcgatgcctcgccacttcgccatcccgacgcatccattttctgccagctaagggcgacatgttcagacccctgtccgttttcatcggcacgcgctatacgcgggccaaacgtcgcagccatttcgtctccttcatttcgctgacctcgatgatcggcctggcactgggcgtgctggtgatgatcgtggtgctctcggtgatgaacggcttcgatcgcgaaatgcgtacccgcatcctcggcatggtgccgcaggccaccgtcgagtcgtaccagcccatcgatgactggcgcgccctggccgagaaggtcaaggcccacgagcatgtcaccgcggtagcgccgttcacccagatgcagggcatgctcagcgccaatggcgcggtgcagacggtgatggtcgatgcggtcgatccgctggaagaggccaaggtctcgatcattcccgatttcttcaagcagggctcgctggcggaactcaaggccggcggcttcggcatcgtcatcggccaactggcggcgcagaagctcggcgtcggcatcggcgacaaggtcaccctgatcctccccgaggtggcggtcaccccggccggggtgttcccgcggatgaagcgtttcaccgtggtcggcaccttccgcgtcggcgccggcgaactggatggcggcctgtcgctgatccacctggaagacgccgcgcgcctgcagcgctggaagaccaaccaggtacaggggctgcgcctgaagctcgacgacctgttccaggcgccgcgggtggcctgggagatcgcccggaccctgaccgacaatgacttctacgcccgcgactggacgcgcagccacggcaacctgtaccaggccatccgcatggaaaagaccatgatcggcctgttgctgctgctgatcgtcgcggtcgccgcgttcaacatcatttccaccctggtgatggtggtcaccgacaagaagtcggacatcgccatccttcgtaccctcggcgccactccggggcagatcatggctaccttcatggtccagggcacggtgatcggggtgatcggcacgctggtcggcggggtcctcggggtggtcgcggcgctcaacgtcagcgcctggatttccgccctggaaaagctgctgggccaccagttcctcgcgtccgacgtgtacttcatcgattacctgccgtcgcaactgatgctcgacgatgtcgtgctggtctgcggcgcggccctggtcctcagcttcttcgccactttgtatccagcctggcgtgcggcgcgcacccagcctgcggaggctttgcgttatgaatgacaagtcggtgctgagttgccgcaacctgagcaagagctacgacgaggggccgcaatcggtgcaggtgctgtccggcgtcgagttgaacctgctgcctggggagcgggtggctatcgtcggcagctccggttcgggcaagagcaccttgctgaacatgctcggcggcctggacacgccctccgccggcagcgtctggctcgccggcgaggaactctcggcgctgaacgagacggcccgcgggctgctgcgcaaccgcgcgctgggcttcgtctaccagttccaccacctgttgccggagttcaccgccctggagaacgtctgcatgccgctgttgatcggccgcacgccgatcgcggaagcccgccagcgggcggccgagctgctggagcgggtcgggctggggcatcgcctgtcgcacaagccggccgagctgtccggcggcgagcgccagcgggtggcgatcgcccgcgcgctggtcaaccgtccgcagctggtactgctcgacgagcccaccggcaacctcgaccagcataccgcccagggtatccaggagctgatgctggaactgagccgttcgttgcagacctcgttcctggtggtaacccacgatctccagctggccgggcacatggatcgcatcctgcgcctggaagaaggccgactgatcgccgcgtagcggggcgacggcgtgcccgccgtccgctcccgtccggcgaatcccccatcgactcggtgcatccgcgacatgttcagaccgttaccgttcttcataggcctgcgctacacccgcgccaaacgccgcaaccactacatctcgttcatctcgctgacctcgatgatcggcctggcgctgggcgtgctggcgatgatcatcgtgctctcggtgatgaacggcttccagaaggaaatgcgcacgcggatcctcggcatggtgccgcatgccaccatcagcgcggcgcagccgctggacgactggcagaccgtcgccaacgcggcgcttcggcaccgcgaggtggtcggcgcggcgccgttcgccgaactgcagggcatgctgtcgtacaagggcaatatgctgccggtgctggtcaacggcatcgacccgcaggaggagcgcaaggtttccatcgtcggtgagcacatcgtccagggcagcctggacgacctcaagcctggcgagttcggcatcgtcctcggcgagatcaccgcgcggcgcttccatgtcaatgtcggcgacaagctgaccctgatcgtcccggaagccaccagcgcgccgggcggcatcactccgcgcatgcagcgcttcaccatcgtcgccctgttcaaggtcggtgccgaactggacaactcgctggcgctgatcgacatcgccgatgccggccagttgctgcgcctgcaaccgggccaggtgccgagcgtgcgcctggagctgaaggatctctaccagtcgccgcaggtcgccgccaaggtggtcaaggagttggggcagggcttcaggtccagcgactggaccaggacccagggcagcctgttcaacgcgatgaagatggaaaagaccatgatcggcctgctcctgctgctgatcatcgcggtcgccgccttcaacatcatcgccaccctgatcatggtggtcgccgacaagcgcaccgacatcgcgattcttcgtaccctcggcgccacgccgcggcagatcatggcgatcttcatggtccagggcaccgtcatcggcgtgatcgggacggtcatcggcggggtactcggggtgttcgcggcgttgaacatcaccgggatgatcgaccgcatcgaacggttggtcggacacaaggtcttcagctcggatgtgtacttcatcaactacctgccttccgatctgcaggtgctggacgtggtgctgatctgcagcgctgcattgctgatgagcttcctcgccaccctgtacccatcctggcgcgcggcgcggacacaaccggccgagtcgctgcgctacgagtgagcgagaaggcctgcgccagtcccagcacggggcggacaaggcccacgaaaaagccgccttcgaggcggctttttcatgtccggcggattacttcgcggcgacccgttcgcgacgttgccggcagcgtcggctccaactgcgctgcacccaccagcgccagtagagcatcgtcagcgcgtagccgaggatggcggcgatgatgccgcacaccaccgaaccgagcaggaagggctgccagaggctggacagctcctggctgatccattcccaggtgagatggtccggcagggtgcgcggcggcacctgcatcaaccaggcgcccagcttgtaggtgcaatagaagaccgggggcatcgtgatcggattggtcagccagaccaatccgacggagattggcagattgctccgaatccacaccgccagaccggccgccagcagcatctgcatcggcatcgggatgaaggcggcgaacagcccggcggccatggcgcgcgataccgagtggcgattgagatgccaaaggttgggatcgtgcgtcaacttgccgagaaagcgcagcgacttctgcgagcggatgctttccggatcgggcatgtagcgcttgaacaggcgacgcggcatgtgggctctcggtggatataggcttgcgtattatgccaagcaagatgacaggatttcgttgcccattgtatgaccccatgtgacatgtcggggagcggagggcacgccacggggatgggaggaaccgttcatgcgcctgggattgccagccctcgccgcggggctgctggccctgcgcttcctggcggaattgccgtcggtcggctggctgctgggcatggccgccgccggactgttgctgctgttcggccggctgtactggctggggttgttcctgctcgggttcgcctgggcctgcggctcggcgcaagtcgccctggacggacgcctggccgccgagctggatggtcgcaccctttggctggaggggcgtgtggtcgatctgccggcgagcggcgagggcgtcacgcgcttccggctggaggaggtccgcgctgcgcggggcgtgcttcttcccgagcgtctgcgcctgagctggcgcggcgcgccgccgctgatgggcggcgaacgctggcgcctggcggtgaccctgaaacgcccccgcggcctggtgaacgcggcgggtttcgactacgaggcctggttgttggcgcagcgggtcggtgccgttggcacggtgaaggcgggccagcgcctgcagccggccagcggcctggatgcctggcgcgatgcctggcgccagcgcctgctggcggtcgacgcacaggggcgcggcgccgccctggcggcgctggtgctgggggatggctcggggttgagcgcggccgagtggcgaatgttccaggacaccggcaccgtgcatctgatggtcatctccggttcgcatatctcgttgctggcggggatgctctatggcctggtggcggccttgcatcgcctgggctgctggccgcggcgcctgccctggctgccctgtgcctgcgccctgggtttgcttggtgcctggagctacgggttgatggcgggtttcgaggtcccggtgcggcgcgcctgcctgatggtcagcctggcgctggtctggcgcctgcgtttccgccacctgggcttgctgaccccgctgctggcaacgctggtgctggtcttgctggtcgagccgctggccagcctgcaggcggggttctggctgtcgttcctggcggttgccctgctgctctggctgttcgccgggcgccttgggcgctggcgctggtgggcggcctgggggcgggcgcagtgggggatggcgctggggctggcgatgccgctgctggcgctgggcctgccgttgagcctgagcggagcgccggccaacctgctggcggtgccttggatcgaactgctggtagtgcccccggccctggcggggagcctgctgctgtgggtgcccgggctgggcgaggggctgcttcgcgccgctggcgtttcgctggacctgctgtttcgtgcgcttggcctgctggcgggcctggccgaggcctggcagccacccgccgcagcggcctggagcgtagcgctgggcatgctcggcgcgctctgctggctggcgccggctggcttgccgttgcgtgccctcggtgccgcgttgctactgccggcattgttgccgtcatcgccgcctgtcgaatgggggcgggcggaagtgcgggtgctggacgtcggccaggggctggccgtgctggtgcgtacccgagagcatgtcttgctctatgacagcggtgcgcggcagggggcgttcgacatgggcgagcgggtggtggtgccggtgctgcgcagcctggacctgcggcgcctggacggcctgttgctgagccatgccgacaacgaccatgcaggcggtgctcctacggtcgcttcccgattcccgccggtttggctggtcagcggcgaacccgcgcgcctgccttcgccgttgttcgcggacagctgcgacgagcggagctggtcctgggatggcgtggttttcgaacagtgggcatgggcacaggccggcgacagcaacgaccgctcctgtgtgctgagggtcgaggccgatggcgaagtcctgctgctgaccggggacatctcgcgtgcggccgagcatgcctggctggcgcgacaggccgatccccgggtcgactggttgctggcgccgcatcatggcagccgcagttcctccggagtcgccttcgtgttgcgtacgcggcctcgccatgtgctggtctcgcgaggttggcgcaacgccttcggccatccccatggcgaagtgatggagcgttacgcgagggtcgccgcgcaggtccacgacacggcacgcgacggtgccctgacgtttctcctcggaagccgtggcggcgcacgccgggagcgtgattcggcgcacttctggcgggaaaaatgagaaccgtggcggtcggcggaaaagggtcgctgtgctagagtggcgccacttttttttcggggatatgccactgtgtgggaactggttcaagccggcggctggatgatgctgccgatcattctgagttcgatcgccgccaccgccatcgtcgcggagcgcctgtggacgctgcgcaagagccgcgtcgcgccgcccgagctgctcggccaggtgtggaagcagatcaagggaaagcaactgagcgcccagaagctcaaggacctgcgcgccaactcgccgctgggagagatcctcgccgccggtctggccaactccaagcacggtcgcgagatcatgaaggagtgcatcgaggaggctgcttccggtgtcatccacgagctggagcgctacctcaacgccctcggcaccatcgccgcgatggcgccgctgctgggcctgctgggtacggtgttcggcatgatccagatcttcggcgccttcatggacaacggcatggccaactcgccgatgctcgccgcgggcatctccaaggcattgatcaccaccgccgccggcctgctggtggcgattccggcggtgttcttccatcgctacctgctgcggcgggtcgacgaactggtgatcgccatggagcaggaggccatcaagctggtggaagtggtgcagggcgatcgtgaagtcgactacgtcgaggaaggcaaagcgtgaaattccgccgcagacgggcgggtgccgcccgtgaagacgtcttcatcaacctggcgtcgctgatcgacgtgatcttcgtcctgctgctgttcttcgtggtcagtaccaccttcacccgccccgagcagctcaacatcgagctgccatcggcggagagcggcgaaaccgccggcaccgagcagaagcaactggaactctcggtggatgccgaggggcactacgccttgaacgggcaggcgctggccaagagcgacctggccaccctgatggcggcgatgcagcgtgaatcggcgggcgacaacaacctgccggtggtgatcagcgccgatgccaagtccacccaccagtcggtggtcacggcgatggacgcagcgggcaagctgggcttcgtccacctgcgcatcaccacggtcgagaacacggcggccaagccctgatgtcgttctccgagcgactgctcgccgcctggtaccaggggcatccggcgctggcgctgctgcgtccgctggaggctctctatcgtcgggtggcgaacggccgccgggcggacttcctgtccgggcgcaagcccgcctaccgggcaccgctgccggtgctggtggtaggcaatatcaccgtcggcggaaccggcaagacgccgatgatcctctggatgatcgagcactgcagggctcgcggcttgcgggttggcgtgatcagccgcggctatggtgcccggccgcccaccacgccgtggcgggtgcgggccgagcaggacgccgcggaggctggcgacgaaccgctgatgatcgtccggcgcagcggcgtgccgctgatgatcgacccggatcgtccgcgcgccctgcaggcgctgctcgccgaagagcagttggacctggtcctctgcgacgatggcttgcagcactatcgcctggcgcgcgatctggaactggtgctgatcgatgccgcgcgcggtctcggcaatggtcgttgcctgccggccggtccgttgcgcgaaccggcggagcgtctggaaagcgtcgacgcgctgctttacaacggcgccgacgaggatcctgacggcggttacgcattccgcttgcagcctactgcgctgatcaacctgcagagcggcgagcgccgaccgctggagcattttcccgcgggccaggaggtccatgccctggccgggatcggcaatccgcagcgtttcttcaggacgctcgaggcgctacactggcgggcgattccgcatgccttcccggatcacgcgacctacacggcggccgaactggcgttcagcccgccgctgccgctgctgatgaccgagaaggatgccgttaaatgccgggctttcgcagcggccgactggtggtacctggcggtcgatgcggtgccttccccagcattcgtcgcctggttcgacgcccgactcgagcatctcctggcgcgctgaccggcggccgtgccgccattgtatgaaggactccgccatggacccgaaactcctcgatatccttgcctgcccgttgaccaagggcccgctggtgctcagcgaagacaagaccgaactgatcagcaagcaggccggcctggcctatccgatccgcgacggcatcccggtgatgctggagagcgaggctcgctccctgaacgtggacgagcggctggacaagtaatgatcaaggcgttcactgtcgtcattcccgcccgctacgcctccactcgcctgcccggcaagccattgcaggatatcgccggccagccaatgatccagcgcgtctggaaccaggcccgcaagagcgccgccagccgcgtggtcgtcgccaccgacgacgaacgcatcctggcggcgtgccaggggttcggcgccgaggcgctgctgacgcgtgccgagcacaactccggcaccgatcgcctggaggaagtcgcttcccggctcggcctggccagcgatgccatcgtggtcaacgtccagggcgacgaaccgctgatccccccggcgctcatcgaccaggtggcggccaacctggcggcgcacccggaagctgccatcgctaccctggccgagccgatccatgaggtctccgcgctgttcaatccgaacgtggtcaaggtcgccaccgacatcgacggcctggccctgactttcagtcgtgcgcccttgccctgggctcgcgacgccttcgcccgcgatcgcgacagcctgccggagggcgtgccctatcgtcgccacatcggcatctacgcctatcgcgtgggtttccttgccgatttcgtcgcctggggaccgtgctggctggagaacgccgaaagccttgagcaattgcgcgcgctctggcacggggtgcgaatccatgtggccgatgcccgcgaaaacatgcttccgggcgtggatacgccggaagacctcgaacgcgttcgccgcgtgctggggggctgatgcgcgtcctgttcgtctgcctgggcaacatctgccggtcgcccaccgccgaaggcgtgttccggcgcaaggtcgaggaggccgggctggcttcccgcatccatgtcgattccgccggtaccgccggctggcatgtcggcaaggcgcccgaccagcgcacccgcctggccgcgcaaaggcgtggctacgacctgtcggcactgcgtggacgccaggtcggcatcgaggatttctcccgccatgacctgatcctggccatggacctgtccaacctggctgacctcgagaccctgcgtgccgggcgcggtgccgccgaactggatctgttcctgcgtcgctacggatccgagcgggacgaagtgcccgatccctactatggcggcgaagaaggcttcgagcaggtcctcgacctgatcgaacatgcctgcgaccgtctgttgatcgaagccaaggggcgactgtgagcctggaactgcaagagcattgctcgctgaagccctataacaccttcggcatcgacgtgcgcgcccgcctgctggcccacgcccgggacgaggctgatgtgcgcgaggccctggccctggctcgggagcgtggattgccgctgctggtgatcggtggtggcagcaacctgctgctgacccgtgacgtcgaggcgctggttttgcgcatggccagccaggggcggcgaattgtttccgatgccgcggattcggtgctggtcgaggcggaggcgggcgaggcctgggacccattcgtgcaatggagcctggaacggggcctggccggtctggaaaatctcagcctgattcccggcaccgtgggtgcggcgccgatgcagaacatcggcgcctatggcgtggagctgaaggacgtcttcgacagcctgacggcgctggatcgccaggatggaaccctacgtgagttcgatcgccaggcctgccgtttcggctaccgcgacagcctgttcaagcaggagccggatcgctggctaatcctccgcgtgcgcctgcgcctgacgcggcgggagaggctgcacctggactacgggccggtacgccagcgcctggaggaggagggcatcgccagtccgacggccagggacgtaagccgggtaatctgcgccattcgccgggagaagctgcccgaccccgccgtattgggcaatgccggcagcttcttcaagaacccgctggtggatgcggcgcaggccgaacgcttgcgtcaggccttcccggatctggtcggctatccgcaggcggacggtcggctgaagctggctgcaggctggctcatcgacaagggcggctggaagggtttccgcgatggcccggtgggggtacacgcgcagcaggcgctggtcctggtcaaccatggcggcgccactggtgcccaggtccgggcattggccgagcgtatccaggaggacgtccgtcggcgtttcggcgtcgaattggagcctgaacccaatctctactgagggtgcggctggagaatgaaaaagggatgccggcggcatccctttttcattgtgcgtgttcggcggctctggtcatgacgggcggtatgccggagtgccgcggaatggcgcgcaaaaaaaggggatgccatggcatccccttttttcagcctgtcactcaggcatgcgggcgcgaggtttcgctttcctcggcctttttcgcgtgctccgtgtcggcggcgtcttcgccggaagcttcaggctcggcctgtaccgcttcctgggcttcgtccgcctgggacggaacgtcggcctgggtgatttcttcagcctggggtgcagcaggttcctcctgggccgacgcttcctcgctcgctacagccgggatctcctcgacggcgggagcggcctgagctgccgcttcggctgctgctgcggcttcgcgtgccagacgctcggcttcgcgttgcaggcgacgtttttcccgtgggtcgttgagggcacggccagtcgcgttggccggcaccgccgcgatggccggggtcggctcctcggtggctgcgggctcgctaggggctgctacttcgacgggcaccggagcggcaacttcttcggccgcttccgttgccggttgcacggcgctctcggcgtcttcgcggctttccacgctttcgctggcgaagggagcttcttcagtgacttgcgcgaccagcagggtgctctggtcggcttcgtcccggaccacgctgacggtcaccggcgcttcgatgtcggcggtttcgccggcattggcctcgctgtccgcgccctgggtttcgacggcttcgctggtcggtgcgtcggtttcatcgcttgccgtggtttcgctggcagcctcgctggtagtggccgggtcttgctccacgtttgcttctacggcttcgctggcgacagcgataccggcagcagcggcggctgcgacggtgttcagcggcgcggcggcgttatcggtcgcctcgctgccttccagctcgccgctgacctcgcgctggcgttcgcggcggttgctgcgacgacgctggccgcgggagcggcggcgcgggcgctcgccatcggtatcgtcctgctcgtcctgctccaggctctcgtcgttcggcagcgcctcggcttccagggccgcggcgtcgcgagcctggcgatcctcgcgcggctggcgctcttcgcgggccgggcgctcggcgcgttcttcacggccttcgcggggttggcgctcttcgcgagccgggcgttcggcacgctcttcgcggcggcgttcgctgcgttcctcgcgaccttcgcggccttcgcgcggctggcgttcttcgcggggtgtccgctcggcgcgctcttcacggccttcgcgcggctggcgctcctcgcgagccgggcgctcggcgcgctcttcgcggcggcgttcgctgcgctcttcgcgattcgggcgttcggcgcgctcttcgcgcggttgacgttctgcgcgttcctcgcggggcttgcgctcttcgtcgcggcgattgccatcgcggccatcgcggcggcggttctgctggcggccgttgcgacgctcgtcctggcgggtttggcgctcggcagccggcttgctggtttcagcaggcttggcggcaggttgatccttgcctgcgaacaggccgaccagggacttcaccaggccctggaacaggctcggctcgggcatcggcttggccggctcgaccggtgcttcggtgtgttgcggtgcgggctgctggggagcgacggtcttgactgctgcttcctggcggaccagggtgcgggtcgagctgaccggctgggcttcttcgtgctcgacggtggccatttcgtagctggtctggccggcaaccagttcggggctgtcatcgcgcagacgctggacttcgaaatgcggggtttccagatgatcgtccggcaggatgaagatgcgcgcgcgggtacgcagttcgatcttggtgatggcgttgcgcttctcgttgagcaggaaggcggcgacctggaagggcacgcgggcgcggacttccgcggtgcggtccttcagggcttcttcctcgatcaggcgcaggatggccagcgacagcgactcgacatcgcggatgatgccctggccgttgcagcgcgggcagacgatgccgctggtctcgccgagggacggacgcaggcgctggcgggacatttccagcaggccgaagcgcgagatgcgaccgacctggacgcgcgcgcggtcggcctcgagggcttcgcggacacgctcttccacggcgcgctggttcttcgccggggtcatgtcgatgaagtcgatgacgatcaggccgccgatgtcacgcaggcgcagctggcgggcgatttcctcggccgcttccaggttggtctgcagggcggtttcctcgatgtcgccgcccttggtggcgcgcgccgagttgatgtcgatggaaaccagggcctcggtcgggtcgatgacgatggagccgccggacggcagcttcacttcacgctggaaggcggtctcgatctggctctcgatctggaagcgattgaacagcggaacgctgtcctggtacagcttcaccttgctggcgtactgcggcatcacctggcggatgaagttcagggcttcttcctgggcgtcgatgctgtcgatcagcacttcgccgatgtcctggcgcaggtagtcgcggatggcgcggatgatgacgttgctttcctggtagatcaggaagggcgcgccacgttcgccggacgcttccttgatcgcgctccacagttgcagcaggtagtcgaggtcccactgcagttcctcggtgctgcggccgaggccggcggtgcgcacgatcaggcccatgtcggccggtgcgttgaggccgttcagggcctcgcgcagctcgttgcgctcttcgccttcgatacggcgggagatgccgccggcgcgcgggttgttcggcatcagcaccaggtaacggccggccaggctgatgaaggtggtcagggcggcgcccttgttgccgcgctcttccttctcgacctggacgatgacttcctggccttcgctcaggacttccttgatgttgatccggccttcgggggacttcttgaagtattcgcgggagatttctttgagggggaggaagccgtggcgttcggcgccgaagtcgacgaaggcggcttcgaggctgggttcgacgcgagtgatgcggcctttgtagatgttggccttcttctgctcgcgggcgcccgactcgatgtcgaggtcgaacaggcgttggccgtcgaccagtgcaacacgcaactcctcgggttgagtcgcgttgatcagcattcttttcatgtagtaccaatggtttccggggctaccggaaacggcgatcggcacacacgactctcacggtcggtgctcgggcgcgtattcaggaatggcgggccattcccgtgtccagcggcgctcggcactgggtgccggtccgcgactacgtctcctgcttcctgtgtttcagaagcacttgagtcaggaggaggaatcggctgtcggaggcggacgaaaaatgcgtctggatcaagctagaagctacgcagtccaacagccgtacatctccaccctacacatgttccttaagaatcgggcgccgctcgcagtatccggagcgggttggcatctcgcgctcaccgaagtggtcgcggctcatgtttcaaggctttggtttcgagtcgttagcgggttggaaattttcgtatttccgctgaaacgcctctgtaggacggcctgacgtccgttcaaagtgtttgcaggcgagggggaaatgcaggttggcaatcatccgcaggccaggccgcttatggcggcttcccgactatagcagcaatgattaagtgcttcaattgaatgaaaaattgttatgatgtacggatgactactcccgcctctccgaccaccggtgtccagctgctcgatgtgccgccggaactggctggtcaacgtatcgacaatttccttatcgcccgtctcaagggtgcgcccaagaccctgatttatcgcatcctgcgtaagggcgaagtgcgcgtgaacaaggggcggatcaagcccgactatcggctccaggccggagaccaggtgcgcgtgccgccgctgcgcctggccgagcgtgatgagccggcgccgctggcgcaggggctgctggagcggatggaggcggcgatcgtctacgaggacaaggcgctgatcgtggtcaacaagcccgccgggatcgccgtgcatggcggcagcggcgtgagcgccggggtcatcgaggtgtttcgccagttgcgccccgatgccaaggatatcgaattggtgcatcgtctcgatcgcgatacctccggcctgctgatgatcgccaagaagcgcagcatgttgcgtcacctgcatgaggccctgcggggcgagaaaatcgtcgacaagcgctatcacgccctggtccgtggccactggccggctggcaagaagaacgtgcgcgcgccgctgctgaagaacaacctgcgttcgggcgagcgaatggtagaggtgaacgtcgagggcaaggacgcgctgaccgagttccgggtgctgcgtcgcttcggcgatttcgccaccctggtggaagcacgcccgatcaccgggcggacccatcagatccgcgtgcatgccaagcacgccgggcatgccatcgccggcgacccgaagtatggcgacgaggatttctcccgcgagatccgcgagctgggcggcaagcgcctgttcctgcatgccgcgcagttgcgcgtgccgctgcccgacgggcaggtgctggagctggaggcgccggtggacgagatgtggcagcgttcgctggagcgtttgaatgactgactacgcgttgctggtattcgattgggacggcaccctggtcgactcgatcgcgcgcatcgtcgattcgatgaaggcggcggcgcgggaaaccgctctgccggagcgggacgatacccggatcaagggcatcatcggcctcggcttgcccgaggcgatcgcttcgctctatccggaggttggcgatcctgctctggtcgagcgtttccggtgtgcctacagcgagcattacctggcgcaggaagcgcagccgtcgcggttgttccccggcgtggccgaagccatggtgcattttcgcgaggccgggttccgcctggcggtcgccaccggcaagagtcggcgcggcctggaccgggtgctggcggggcatggctggagcgatttcttcgatatcacccgctgcgccgacgaaacggccagcaagccggacccgttgatgctccacgagatcctggcgcactgccgggtcgagccggggcgggcgctgatgatcggtgattcgccgttcgacctggaaatggcgcgacgggcggggatggattcggttgcggtggcctatggcgcccaatcgctggagcagttgcggccttatgcgccgcggctggaagttgagcatttcaccgagttgcgcgcctggttgggcggtgctcgacgtgaggcggtttcaggagtggttgagcatgtctgacgagtggaagtcggaaacgccgaaggcgaatgacgacaagagctggaagctgctggaaaaggcggtcctcgccggggtccaggagcagcggcgggcgcggcgctgggggatattcttcaagtcgctgaccttcatctatctctttgtcgtgctgctggccttcagtccgttcggcagcctggagaaatcggcctcgcgcagcggtagccacacggcactgatcgaggtgaagggcatgatcgccgacgatgagccggccagtgccgacaatatcgtcacggccctgcgcgcggcgttcaaggatgagggtaccaaggggatcgtcctgcggatcaacagtccgggcggcagtccggtgcagtcgggctatatctatgacgagattcgtcgcctgcgcggcgagcacccgaacgtcaaggtctatgcggtgatcagcgacctgggtgcctccggcgcctactacatcgccagcgccgccgaccagatctacgccgacaaggccagcctggtcggttccatcggcgtgacggcggccagcttcggtttcgtcggcaccatggagaagctcggtgtcgagcggcgcgtctatacctccggcgagcacaagtcgttcctcgatcctttccagccgcaaaagcccgaggagacccagttctggcagcaggtgctggataccacccacaagcagttcatcgacagcgtgaaaaaagggcgcggcgaccggctcaaggtcgaggggcatccggagctgttctcgggtctggtttggtccggcgaacaggcattgcagctgggtttgatcgacggcctgggcaatgccagctatgtggcgcgcgaagtggtgaaggagaagaagatcgaggactacaccgtgcaggagtcgccgttcgatcgcttcgccaagaagttcggtgccagtgtggcggagcgcctcgcgctgtggatgggctggcaggggccggtactgcgctgagggtgtttcccttccttatataaagaagcccggccgaagccgggcttctttatatggaatgccggctcaggggatttcgacgccttcctcgaggagcatgtcgaccaggcggatcaggggcagtcccaccaggctggtggcgtcctctccttcggtggagcggaacaggctgacgcccaggccttccgccttgaagctgccggcgcagtccagcgggcgttccgcttcgacgtagcggcggatgcggctctcgtcgaggtggcggaagtgcacggtgaacggcacgcatgccacctggatgcgtcggctggcgctgttgaggagggccagtccggtgaggaaggtcacgctcttgccgctggcgtcccgtagctgctggatggcgcgttcgggggtgtgcggcttgccgaggatgttgccgtcgagtacggcgacctggtcggagccgatcaccaggtgttgcggatagcgtccggccagcgcttcggccttgctggcggaaaggcggcgcaccagttcctcggcactttccccggcgcgatggctttcgtcgatatcggggctggcgctttcgaagggaaggcgcaggcgggtcaggagttcgcgtcggtagggggagctggaggcgaggatcaggtcgggcatgaggttctccatggcgagcggccgattttaacgaaaagactcgtccttacagcggtttatggctaatttcctttgacaggcgcgggggcgtccctataatggcgcgcttatgttgaatgggccgattccacctcatatcgatccgcgcaagttggtcgaccgcggcgccaccctcgagggtgggtacgcgctcgccgatatgccgcgtgtatgcgagcaactgaccagcgatgccggtgaggtgcgcgtgaaggtttccttcgagcgcgaccaccagaagctggcggtcatgcatatgcagctcgataccgaggtgagcatggtatgccaacgctgcctggatgcggcggccattcccgtgcatggcgaatatacctacgccattcttcgggaaggtcagtccgccgacggtctgccgaaggggtacgatgcgctggaagtgggggaggaacccctggacctgctggcgctggtcgaggacgagctgttgctcgccttacccatcgttccggcccatgaccccgaagtatgtcagcacccggctggattcgtcgtcgaagacgagccggagtcgagcgaagtcgaggacaagcgtcctaatccgttcagcgtactggcacagttgaagcgtgacccaaacgtttaggagttaatcaatcatggctgttcagcagaacaaaaagtctcgttccgctcgtgacatgcgtcgttcccacgatgcgctcgagtccaatgctctgtccgtggaaaagagcaccggtgaagtccacctgcgccaccacgtatccccggacggcttctatcgcggccgtaaggtagtagacaagggctccgacgagtaatccttgtccgcaccaatcatcgcgattgatgcaatgggtggggacttcggtccccactgcgttgttccggcctctattgccttcctggccgagaattcctcttcgcaactgatcctcgtcggtcagcctgccctcctcgaagaactcctttcccgctatccgtcgctcgaccggcagcgcctgcgtgtgcatgcggccagcgaagtgataggttcagacgaacgtccctcccaggccttgcgtggcaagccggacgcttccatgcgcgtggcgctggagctggtccgcgacggccgggcgcacgcgtgcgtcagcgccggcaataccggggcgttgatggcgctgtcgcggcacctgctgaagaccctgcccggtatcgaccgccctgcgatggtgacggcggttccgaccgagcaggggcattgtcatctgctcgacctcggcgccaacgtggattgcagtgccgagcatctctatcagttcgcggtgatgggcgcggtggcggcagaggccttgggctgcgtctcgccccgggtcgccctgctcaacgtggggaccgaggagatcaagggcaaccagcaggtcaagctggcggcgagtctgttgcagaaggcgcaggggttgaatttcagcggatatatagagggcgatggcctgtatcgcggcgaggccgacgtggtggtctgcgacggtttcgtcggcaacatcctgctgaaggccagcgaaggcctggctgccatggtgtcggcgcggatcgaacagcgcttccgcgatggactggcggcgaagctggtcggtgcgctggcgttgccgctgctgcgccggctgcgcggcgatatcgctccggcacgctataacggcgccagtttcctcggattgcaggggatagtggtgaaaagccatgggtctgccgccgaggagggtttccagagcgccttgcgtcgcgcggcactggaagtccgggaaaacctgccgcaacgattgcatggccgtctcgagcatctgctgctctaatgtgtgaccgggcggtccaggcagccatccaacactcagtttcctgcgccagtcgcggctggcgcgttatctccgacgagcaaaagaccacaagggacctattcaatgtctgcatccctcgcattcgtcttccccggccagggttcgcaatccctcggcatgctggccgagctgggcgcccagcaggcgctggtgcgcgataccttcgccgaggcctccgaggcgctcggttacgacctttgggcgctggtccagaatggtcctgaagagcgcctgaaccagaccgacaagacccagccggccatcctcacggtttcgatcgcgctctggcgcctctggctggccgagggcggtgcgcgcccagcgttcgtcgccgggcacagcctgggcgaatattccgcgctggtcgcggccgaaagcctggcgttcgccgatgcggtcaagctggtcgagcgtaggggccaactgatgcagcaggcggttccggcggggcagggcggcatggccgcgatccttggcctggaagacgccgatgtattggcggcctgtgccgaggcggcccagggcgaggtggtcagcgcggtcaacttcaacgcgccggggcaggtagtgatcgccggtgccgcggctgccgttgagcgtgccatcgaggcatgcaaggcacgcggcgccaagcgcgcggtggcgctgccagtcagcgtgccgtcgcattgcgaactgatgcgtccggccgccgagcagttcgccgcctcggtcgaaagcctgcagtggcaggcgccgaagattgcgctggtgcagaacgtcagcgccgccgtgccggctgatctcgatacgctgcgccgcgacctgctggcacagctgtacagcccggttcgctgggtggagagcatccagctgctggcggaaaagggcgtcaccgagctggtcgagtgcgggccgggcaaggtcctggcaggcctcaacaggcgctgcgcgaagggcatcaatacccatggcctggatggcgtcgaggcgttcgccgccacgcgcgccgccctggcctgagagagagaaaggagagaatcccatgagtctgcaaggtaaggtcgcattggtaaccggcgccagccgtggcatcggccaggcgattgcgctggaactggggcgcctgggtgccgtggtcatcggcaccgcgaccagcgcgtccggcgccgagaagatcgccgaaaccctcaaggccaatggcgtcgagggtgcgggcctggtcctggacgtttccagcgacgaatccgtagccgcgaccctggagcacatccagcagcatctcggccaaccgctgatcgtggtcaataacgccggcatcacccgcgataatctgctggtgcgcatgaaagacgacgagtggttcgatgtggtcaacaccaacctgaacagtctctaccgtctgtcgaaagccgttctgcgcggtatgaccaaggcccgctgggggcgcatcatcaacatcggttccgtggtcggcgccatgggcaatgccgggcaaaccaactatgccgcggcgaaggccggcctggagggcttcacccgtgcgctggcccgggaagtcggttcgcgtgccattaccgtgaatgcggtggcgccgggcttcatcgacaccgacatgacccgcgagctgccggaagcccagcgcgaagcgctgctgggccagattccgctgggtcgcctggggcaggcggaagagatcgccaaggtggtcggcttcctcgcttcggacggcgcagcctatgtgaccggggccaccgtgccggtcaatggtgggatgtacatgagctgaatgtgacgttacctttctcgggtctgtcataagcgctgtctagaattcgttgcggaattgcagccgggttattagatagaattatcgaagtggccgtgggaaggtgaggcgttcagcttgaaaagcagaaaaccctttctatacacttacccgcagcccagctgctcggattttccataggagtgaaaacaaggtatgagcaccatcgaagaacgcgttaagaagatcgtcgctgaacaactcggcgtgaaggaagaagaagtcaccaacagcgcttccttcgtcgaagacctgggcgccgactcccttgacaccgtcgagctggtgatggctctggaagaggaattcgagaccgaaatccctgacgagaaagctgaaaagatcaccaccgttcaggaagccatcgactacatcgttgctcaccagcaataagtagtcgtcggattttccgacgtggaaaagccgcacagcctgtaagggcgtgcggcttttctttagcgccttacctactctggtagtctgtcggcgcaaccccgtgaaatgagaaagaggaagtcgtagtgtcgcgtagacgcgtcgtcattactggcatgggcatgctgtcgccgctgggcctggatgtcccgagcagttgggaaggtattctcgccggtcgcagcgggatcgccccgatcgagcatatggacctgtccgcctattccacccgcttcggtggttcggtcaagggtttcaatgtcgaggaatacctgtccgccaaggaagcccgcaagctcgacctgttcatccagtacggtctcgccgccagcttccaggccgttcgcgattccggcctggaggtcaccgacgccaatcgtgagcgtatcggcgtatccatgggttccggtatcggcggcctgaccaatatcgagaacaactgccgatccctgttcgagcaggggccgcggcgcatctcgccgttcttcgtgcccggttcgatcatcaacatggtttccggcttcctgtcgatccacctgggtctgcaggggcccaactacgccctcaccaccgcctgcaccaccggtacccacagcatcggcatggctgctcgcaacatcgcctatggcgaggccgacgtgatggtcgccggcggttccgaaatggctgcctgcggtctcggcctgggtggtttcggcgcggctcgcgcgctctccactcgcaacgacgagccgacccgtgccagccgtccgtgggaccgggatcgcgacggcttcgtcctgtccgacggttccggcgccctggtgctcgaagaactggagcacgcccgtgcccgcggcgcgcggatctatgccgagctggttggcttcggcatgagcggcgacgccttccacatgaccgcgccgccggaagacggcgccggtgccgcccgctgcatgaagaacgcgctgcgcgatgccggcctggatcctcgccaggtcgattacatcaacgcccatggcacctccaccccggccggcgacatcgccgagatcgccgcggtgaagagcgtgttcggcgagcatgcccatgcgctgtcgatgagttcgaccaagtcgatgaccggccacctgttgggtgccgccggtgcggtggaggcgatcttcagcgtgctggccctgcgcgaccaggtcgccccgccgaccatcaacctggacaacccggacgaaggttgcgacctcgacctggtggcccacgaagccaagccgcgcaagatcgacgtggccctgtcgaactcgttcggtttcggcgggaccaacggcaccctggtgttccgcaggttcgccgactgatgctggactgggtcgacggccggcccgccgccgagctgtccgtgcgcgatcgcggactggcctatggcgacgggctgttcgagaccctggcggtgcgcgccggcacgccgcgtctcctggagcgccacctggcgcgcctggaagaggggtgtcggcgcctggcgatccctctcgacgccgcggcgttgcgccaggagttgctggcgttctgcgcggcgctgggcgacggtgtcgccaagctgatcgtcacccgcggcgagggtttgcgtggctacgcgccgcctgccgaggcctcgccgcggcgaatcctctccggatcgccgcgtccggcctatcccgagcgccactggcagcaaggcgtgcgcctgttcgcctgccgcacgcgcctggccgagcagcccctgctggccggcctcaagcacctcaatcgcctggagcaggtcctcgcccgtgccgagtggagcgacgccgggcatgccgaagggcttatgctggacgtgcacgagcgggtagtggagggcgtgttcagcaacctgctgctggttctcgacggcaccctcgtggcgcctgacctgcggcgctgcggcgtcgctggagtgatgcgcgcggaattgctcgagcgcgccgaaggaatcggcgtcccgctggcgatacgggatgtttccatggctgaactggcgacggccgacgaggtctttctgtgcaacagccagttcggcatctggccggtccgggcattggacgagcacgtctggccggtcggcgagctgacccgtaaactgcaagaccaacttcgcgacgacctggatttctgactttgatgcgcaaactgctggtgctgctggagagtggcctgttgttcgttggcctctgcgtcggcctggctgcatggcagcagcagcgggcgctggagcagcccctgcaattgaccgaggagcgcctgctggacgtttcctcgggctccacgccgggcggcatgctcgcgcgtctggagcaggaagaggtgctccatggcgcgttctggctgcgcctctactggcgtttcaacctgccgggccaggccctgcacagcggcgaataccgcctcttgccggggatgaagggcgccgacctgctggaactctggcgcgaaggcgaggtggtgcagtacagcctgaccctggtcgagggctggagtttccgccaggtgcgcgaagcgctcgccaggcagggcaagctggagcagaccctggccggcctgagcgacggcgagatcatgcaacgcctcggcaagcccgacgaagtggccgaagggcgcttcttccccgatacctaccgctacacccgtggcatgcgcgacatcgacatactgcgcaaggcctaccagcgcatgcagaccatcctcgccaaggaatgggatggccgcagccaggacctgccttatcgcgacgcctaccaggcgctgatcatggcctcgctggtggaaaaggaaaccggcgtgccggaagagcgttcgcagatcgccggcgtcttcgtccgccgcctgcagcgcggcatgctgttgcagaccgatccgacggtgatctatggcatgggcgagcgctacaacggcaagatcacccgcgccgacctgcgcgaaccgaccccttacaatacctatgtggtgccgggcatgccgccgaccccgatcgccctggccgggcgcgaggcgattcgcgccgcgctgcatccggccgagggtgagaccctgtatttcgtggcgcgcggcgatggcagccatgtgttctccagcagcctggacgaacacaacaaggcggtccgcgagtaccagttgaagcgtcgctcggactatcgctccagccccgcgcccatcaccccgccgccacaatgagcggcgcagccaagataaggagtgccgtgtgaccggcctgttcgtcaccctggagggcccggaaggggccggcaagagcaccaaccgcgactacctggccgagcgcctgcgcgagcgcggcatcgaggtgcagttgacccgcgagcctggcggcacgcctctcgccgagcgcatccgtgaactgctgctggcgcccagcgacgagccgatggccgccgataccgagctgttgctgatgttcgccgcgcgggcccagcatctcgccggggtcatccgcccggcgctggcgcgcggggccgtggtgctctgcgatcgcttcaccgatgccacctatgcctaccagggcggcgggcgcggtttgccggaggcgcgcatcgccgcgctggaaagcttcgtccagggcgacctgcggcccgacctcacgctggtcttcgacctgccggtggaaatcggcctggcgcgggcggcggcgcgtggccggctcgaccgtttcgagcaggaggaccgacgcttcttcgaggccgtgcgtcagacctacctgcagcgcgccgcgcaggccccggagcgttaccaggtgctcgatgccgggttgccgctggccgaggtgcaggctggcctggatcggctgctgccgaatctgctggagcgtctgaatggctgatatctatccctggcagcaggcgctctggagccaactgggcggccgcgcccagcacgcccacgcctatctgctctacggtcccgccgggatcggcaagcgtgccctggccgagcattgggccgcccaactgctctgccagcggcctgccgccgctggcgcatgcggcgagtgcaaggcctgccagttgctggccgccggtacccatccggactacttcgtgctggagccggaggaggcggagaaaccgatccgggtcgatcaggtccgcgacctggttggcttcgtggtgcagaccgcgcaactgggcgggcgcaaggtcgtgttgctcgaacccgccgaggcgatgaacgtgaacgccgccaacgccctgttgaaaagccttgaagagccgtcgggcgatactgtgctgctgctgatcagccaccagcccagccgcctgttgccgaccatcaagagccgctgcgtgcagcaggcctgccctttgccgggcgcggcggcgagtctggaatggctggcgcgggccctgcccgacgagccggccgaggccctggaggaactgttggcgctttccggcggctcgccgctcaccgcccagcgcctgcacggccagggcgtgcgcgagcagcgcgcgcaggtggtcgagggggtgaagaagctgctcaagcagcagatcgccgccagcccactggccgaaagctggaacagcgtgccgttgccattgctgttcgactggttctgcgactggacgctgggcatcctgcgctaccagttgacccacgacgaggaggggctggggttggccgacatgcgcaaggtgatccagtacctgggcgacaaatccgggcaggccaaggtgctggccatgcaggactggctgctgcaacagcggcagaaagtgttgaacaaggccaacctcaaccgtgtcctgcttctcgaagccctgctggtgcagtgggcaagcctgcccgggccgggctagaatcccgctgatattcgactggcaggaacctgcatgagtttgccacccaatctggggccgcgtaacggcattctgtccttgaccatcaaggacaagtccgtgctgtacgccgcctacatgccgttcatcaggaacggcgggctgttcattcccaccaacaagaactacaagctcggcgacgaagtcttcatgctgctcaacctgatggaagagccggagaagatcccggtggccggcaaggtcgtctggatcaccccgaagggcgcccagggcaaccgtgcggcgggcatcggcgtgcagttcaacgacggtgacaacaccgcccgcaacaagatcgaaacctacctggccggggcgctgaagtcggaccggccgacccacacgatgtaacgctagacaggatcatgctggtcgattcccactgccacctcgatcgcctcgacctggccgcccatggcggctcgctcgatgcggcgctggatgccgcgcgagcgcgtggcgtcggtcaattcctctgcatcggcgtcagcgccgacaatgcccaggcggtgaaggccctggccgagcgctatgccgacgtgcactgttcggtgggcgtgcacccgctggacctggagcccggaagcgcgccagcgctggactggctgctgggcgaactggcgcatccgcgggtggtggcgatcggcgagaccggcctcgactaccactacgaaccggaagccgccgagttgcaacaggaggcgtttcgcctgcacctggaagccgcgcggatcaccgccaagccagtgatcgtgcacacccgcgaggcgcgcgccgacacgctggcgctgctgcgcgaggcggcgttgccgcaggccggcgtgctgcattgcttcaccgaggactgggaaatggcgcgatcggcgctggacctgggcttctacatttccctgtccggcatcgtcaccttccgcaatgccgatgccctgcgcgaggtggctcgccaggtaccggccgaccggctgttggtggagaccgactcgccctacctggcgccgattccccatcgcggcaagccgaacctgccggaatacgtgcgcgatgtcgccgaattcctcgcgacgttgcgtggcgtcagcctggaaaccctggcggagcagactaccgccaatttccatcggctgtttccgttggcccgctaggccggcgcacggataaaaaaaacccgggttctgggggatgaatccgggtcaagaccattaggagtggaacaaaggtacgcattcctcggtaccttcactggctgggtacttggggggagataccgcgcgccagtacctttcagtattggtcatgttcgtggggcgtccagacagggctggcggttttttaaacagatttggaatacccttgccgtccttgagtacctaggtgcctgcgacctggcgcaagatcgccaaggtatcgtcgatcaccgtcgaactcgtgtagaagtgcggggaaaaacggatacctccgccacgctgggcgcaaatgacccgttcctggcgaagcgtttcgaagagtgtccgattgtcctggccgtccaggctgaaggtcaggatgcccgcgcgtcggctcgggttccgcgggctgtgcaggcgtaccccgggaattcccgacagaccgtcctgtagccactggacgcgctcggcgatgtctctgccgacccgctccatgccgacctcctccaacagccccaggctggcctccagggccatcgcgccgagcatgttcgggctgccgcattcgaagcgccgggcgctgcgcgccggccgccagtcgcgacgctcgtaatcgagggcatgttccagcatgtgccagccatattcgtgcagcgccaggcgctcgcgctgctcgggatggcaatagaagacgcccagcccttcggggccgagcatccacttgtgcccatcggccatggcgaaggcacaatcgtaggcctgtacgtcgaagggcagggcgccgagctgctggatcgcgtcgatgcagaacagcaccccgcggcggcgacatcccgcgccgatgcgctccaggtcaaggcgcaggccgctggcgtactgcaccgcgctgatcgacagcaggcgggtgcgcgggccgcaggcggcgagcagggcgctctcgggatcgtcgccggcgagaccgacctcgaccacttcgacgccgcgcgggcgcaaggcttcccagaccactctattggaggggaactcctcgttgccgatgacgacctggtcgccctctcgccaatccaggccgaaggctacgaaggaaagcgcctcggaggtgttcttgaccagggcgaggtcgctgccggcgcgcgcattgagcagtcgggcaaggcgctcgcgcaggcgatgttctatcttcagccattccggatagtcgctggcgccgtgggcgacgttctcccgggcgaaggcgctcaccgcgtcggcggcgcgtctaggccagggtgcgaccgctgcgtggttgaggtagcgcagaccgttggtctggtcgaattcgtcctggtaacaattcatcgtcggatgttccgtgcattttcgtgctgaataggcataatacgcggcttcgatttttgactcattttgacctgacagtctttttatgcagaaagagcctcgcaaagttcgtgaatttcgtcgccgtgaacaggagattctcgataccgccctcaagctgttcctcgaacagggggaagacagcgtaacggtcgagatgatcgcggatgccgtcggcatcggcaaaggcacgatctacaagcacttcaagtccaaggcggagatctacctgcgcctgatgctggactacgagcgcgatctcgccgccctgttccattccgaagacgtagcccgcgacaaagaagccctgtcgcgtgcctacttcgagttccgcatgcgcgatccgcagcgctaccgcctgttcgaccgcctggaagagaaggtggtgaagaccagccaggtgccggagatggtcgaggagctgcacaagatccgcgcctccaacttcgaacgcctgacccaactgatcaaggagcgtatcgccgacggcaagctggagaacgttccgccgtacttccattattgcgctgcctgggcgttggtgcatggcgccgtggcgctgtaccactcgccgttctggcgcgaggtgctggaagaccaggaaggtttcttccacttcctgatggatatcggcgtgcgcatgggcaacaagcgcaagcgcgaaggcgacgctcccagcgcctgatacctgtggtgccgggacgcagtcactgcgccccgcgcactctttgccggcagggatatactcgtcgcccatcgatccgccggcgggacgtcggctgcccatttccggcgaatccgccggtggctccacgttcgttcaggagttctccgatgagtgtccgtgaattccccatccactacatcgaaccggtgttccggcccccgagcgaggcgcattcgctgatcctcccggtgaccaatggctgttcctggaacaaatgcggcttttgcgagatgtatacccagccgcaaaagaaatttcgcgcccgcgacgagaacgaggtactggaggagatccgccgctgcggcgagcgcctgatcgtcaagcgggtgtttctcgccgatggcgacgccctggtattgccgacccgccggctgctcgcggtgctgcaggcgattcgcgagcacttgccggaggtggagcgggtatccagctactgcctgccgcgcaacctgcgcaggaagtcggtcgacgagttgcgcgaactggccgacgccgggctgcgaatggcctatgtcggcgccgagtccggcgacgacgaagtgctggcgcgggtcaacaagggcgagacctattcctctaccctggatgcgctggaaaagcttggcgaggcggggatcagtcgttcggtgatgatcctcaacggtctgggcggaatgaccctgagcgcgcagcacgcggacaactccgcgcgcctgatgaacgccgcccagccggagtacctgtcgaccctggtggtgagtttccctaccggcgagcagcgtttccgtgctggcttcgccgatttcgaggcgctggaccggcgtgccctgttcgtcgaggtcgaacgcctgttgcagggtttggagctcgaagacacggtatttcgcagcgaccacgcttccaactatctggtgctcaagggcgaactgggtgccgacaaggcgcgcctgctggccgaggtccgccaggccatcgagcagccgcagcacgctgccctgcgccaggagtggcagcgtggcctgtgatggcgcggaagctgcatcggctcgtcattcgccggttttccgacgccggcaggggagatgaccgatgttgcacctgttccgtatcgccctggcgatgctcctcctgggcagcctgtccgcctgcatgaagcccagcgacctggccgacggcgccgactactacctgcgcgacgccggggtgctcgatcacagcgccagccagcgcagcaacaaccggcggatccaggccgactccttcatctacatcggccagggcccgttcgtgccgccgggctaccggtacgcgcggccgaacgtggtggccgagcaggccttcgaaggtttcgtcgagtatttcccgctggtgcgccgcgccaaggcgccgctcggcctggacgacgcgatgcgcgaggcgcgtgccgccggcgctcactacctgctgtactgccgtttcgcccggggcgataacaggatcggcaactgggaggagtgggaagacgaagaggaactcggccgggtcgggcgcgatcgcagtgtcatccaggtcatgctgatcgagaccagcacccgtttcctggtggacagcgcgaccatccgcagccgcggcggtttcctgacgttctacgacgccaccccggaagacctgctgcgtcccccgctggagcaatacgcccaggaattgctgggcctgaacagtcgaggaacaggctatgagtgataccggcaaggccaacgacctgctggcgcagatccccaggggcgaaaagaagggcctgccgcccgtgcacctgtggaatccgccgttctgcggcgacatcgacatgcgcatcgcccgcgacggcacctggttctacctgggcacgccgatcggacgcaagccgatggtgaagctgttctccagcatcattcgccgcgacggcgacgactatttcctggtgactccggtggaaaaggtcggtatccgcgtcgacgatgcgcccttcgtcgcggtgaccctgcaggtgcagggcgagggcggggcgcaggtactgcgcttcgccaccaacgtcgaggacgaggtcgaggcggacgccgggcatccgctgcgcgtcgagatcgacccccgcagccaggaacccacgccctacctgcgggtgcgcgacaacctcgaggcgctggtgcatcgcaacgtgttctaccagctggtcgagctggcggtgccgcgccggatcgacggcatcgaatggctcggcgtctggagccacggcgagttctttcccctcggcccgcagccggactgacaggcgcagcatgaaaaaaggctcccgagggagcctttttcgtttgccttacatgttggggtagttcggcccgccggtaccttccggcgccacccaggtgatgttctgcgccgggtccttgatgtcgcaggtcttgcagtgcacgcagttctgcgcgttgatctggaagcgcttgctgccgtcgtcgttggccaccacttcgtacacgcctgccgggcagtagcgctgggccggctcgtcgtagagcggcaggttcttctcgatcggaatgctcgcatcggccagcttgaggtggatcggctggtcttcctcgtggttggtattggagaggaacaccgaggacagcttgtcgaagctgagcttgccgtccggcttcgggtagtcgatcttcggcgcttcgctggcctttttcaggcaggcgtagtccggcttgtcgtcatgcagggtgacggggatcttgccgccgaagatgttctggtcgatgaagttgaacgcgccgccgccgatagcgccgaacttgtggatggccgcgccgaagttgcggctgcggaacagttcgtcgtacaaccagctggccttgaacgcatcgacgtagctggacagctcgtcgccgccttcgcggccggcggccagggcctcggcgatcgcgtcggcggcgagcatgccggacttcatcgcggtgtggctgcccttgatcttggcgaagttcagggtgccgaggtcacaaccgatcagcgcgccgccggggaagaccatcttcggcagcgaattcaggccgcccttgcagatggcccgggcgccgtaggccacgcgcttgccgccttccaggtactgcttgaccaccgggtggtgcttgtagcgctggaactcgtcgaacggcgacaggtgcgggttgctgtaggacaggtcgatgatcaggccgacgaacacctggttgttctccaggtggtagaggaacgagccgccggtattttcgtcgttcagcggccagccggcggtatggaccaccaggccgggcttgtgcttggacgggtcgatgtcccagatttccttgatgccgataccgtagtgctgggcatcggcctcgctgtccaggttgtatttcttgatcagttgcttgccgatgtgcccgcggcagccttcggcgaacagggtgtacttggcccgcagctccatgccgggggtgtagtagccttctttcgggttgccttcgcggtcgacgccgaggtcgccggtgacgatgccgcggaccacgccgttctcgtcgatcagcgcttcctgggcggcgaagcccggatagatctccacgcccagtccttcggcctgctgggccagccagcggcagaggttgcccagggagatgatatagttgccctcgttgtgcatggtcttgggcacgaagaagttgggcaccttggtagcgctctcggcgctcttcaggacgtagatgtcgtcgccggtcaccggggtattgagcggcgcgccgagttccttccagtcggggaacagctcgttcagcgcgcgcggctcgaacaccgcgccggagaggatgtgggcgcccacttcggaacccttctcgaccacgcagacgctgatctcttgaccggcttcggcggccttctgcttcagtcggcatgcggcggacagaccggcggggccggcgccgacgatgacgacgtcgaattccatgtattcgcgttccactatcgatctcctactcaaggctcacggtatctgtttattggtggctgagatctttccctgatcagagcgggcgcattatatatagctgcatgggcaggtccaatacaaacgtttgtttgaattctttggaagcctgatagaatcggcattcgagggggggaaaccacccttttgccgtattgaccgaaaagggtgatccggtcaagatacgggcggttttgcggtcgctgtctagcagagtgtcggtttccggccggcgagcatcaccggccaggcctgtctggcgacatccttattcaccggagaataacgaggaatccatgaaggttcttgtagcagtcaaacgagtggtcgactacaacgtcaaggtccgcgtcaaggcggacaactccggcgtcgacctcgccaacgtcaagatgtccatgaaccccttctgcgaaatcgccgtggaagaagccgtgcgcctgaaagagaagggcgtggctaccgagatcgtcgctgtctccgtcggcccgaccgccgcccaggagcaactgcgcaccgcgctggcgctgggcgctgaccgtgcgatcctggtggagagcaacgacgagctgaactccctggccgtggccaagctgctcaaggccgtggtcgacaaggagcagccgcagctggtgatcctcggcaagcaggccatcgacagcgacaacaaccagaccggccagatgctcgccgcgctgaccggctacgcccagggcaccttcgcctccaaggtcgaggtcgctggcgacaaggtcaacgtgacccgcgagatcgatggcggtctgcagaccgtcgcgctgaacctgccggccatcgtcaccaccgacctgcgcctgaacgagccgcgctacgcgtcgctgccgaacatcatgaaagccaagaagaagccgctggacgtggtgaccccggacgccctgggcgtttccaccgcttccaccgtgaagaccctgaaggtcgaggcgccggctgcacgctccgctggcatcaaggtcaagtccgtggctgaactggtagagaaactgaagaacgaggcgaaggtaatctaatggctatcctggttatcgctgagcacaacaacgcggccctggcggctgccaccctgaacaccgttgccgctgccaaggccattggcggcgacatccacgtgctggtcgccggacagaacgttgccgccgtggccgaagccgccgccaaggtcgagggcgtctccaaggtgctggtcgccgacaacgccgcctacgcccaccaactgccggaaaacgtcgcaccgctgatcgccgagctgggcaagaactacagccacgtgctggccccggctaccaccaacggcaagaacttcctgccgcgcgtcgccgcgctgctggacgtcgaccagatctccgagatcgtcgaagtggtcagccccgacaccttcaagcgtccgatctacgccggcaacgccatcgctaccgtgcagtcctcggctgcggtcaaggtgatcaccgtgcgtaccaccggcttcgacgccgtcgccgccgaaggcggttcggctgccgtcgagcaggtttccggcccggccgatgccggcaagtccgccttcgtcggcgaagagctggccaagtccgaccgtccggaactgaccgctgccaagatcgtggtctccggcggccgcggcatgcagaacggcgacaacttcaagatcctctacgccctggccgacaagctgggtgccgcagtcggcgcttcccgcgccgcggtcgacgccggtttcgtgccgaacgacatgcaggtcggccagaccggcaagatcgtcgccccgcagctgtacatcgcggtgggcatctccggtgccatccagcacctggcgggcatgaaggactcgaaggtgatcgtcgcgatcaacaaggacgaagaggctccgatcttccaggtcgccgactacggcctggtcgccgacctgttcgacgccgtaccggagctggaaaaggccgtctgagcccgattccaagccgacaagacccgctccccggagcgggtttttttatttcaggatgactccagtaccgcactttgctggactacgccacagccatatacagcaagtttatcaatgacttaggcgagttcaacatatgccggtgctttctgaaacttgacccggcttcccttctactggctcctacgaggctcctgggaatcgggtctttccgaggagtcatcatggctaagatcaagctcaccaagtccgcagtagatgcggcacaaccccaagcgcaagccatcgagctgcgcgatacccttgttcccggcttcctgtgcaagattacgccggccggtcgcaaggtgttcatgctccagtaccgaaccaacgccggcgagcgacgcaagccggccctgggcctgttcggcgagctgaccgttgaacaggcccgctcgctggcgcaggaatggctggcccaggtgcgccggggcggcgatccggcagcggacaaggccgaggcacgccaggcacccaccgttgaggaattgtgcaagaagttcatggaggactactccaagaagcgcaacaagcccagcacccgagtcggctatcaaggcgtcatcgaccgctgcatcatcccgctgctgggccgcaagaaggttcacgacgtgaagcggccggacgttgccgggctgatggagaaactttcatacaagcagaccgaggcgaacaaggcgttcagcatcctgcgcaagatgttcaacatggcggaggtgtggggctatcggccagacggcaccaatccttgccgccatgtcccgatgttccctgccggcaagtccacccatctcatcagcgacgacgacatgggcaagctgttccggcagctcgacaagatcgaggtcgaagggcttgagaactacgtcatccctctggcgattcgcctgcaattcgagttcgccgcccgccgctccgaaatcgtcacgctcgaatgggaatgggtcgatctggagaatcggcgcgtcgtctggcccgacagcaagaccggcggcatgtccaagcccatgagcgaggaagcctaccggctgctttcgacggcaccgagacaggaaggcaatccctatgtgctgccgtcgccacgccatccggcgcagcacctgaccacaggcgaatattacggcggctggtgccgcgtgctcaaggcggcgggtgcgacgcacgtggggacgcatggcatccgccatcgctctgcgaccgacattgccaattcaggtatcccggtcaaggtcggcatggcgctgacggcgcacaagaccgtcgtgatgttcatgcgctatgtccacaccgaggacgatccagtgcgcgaggcggccgaactggtggcgaaccggcgcaaggcgattaccggcgccaagcagcctcctgcggaggcgacagcatgaccaggcgccggtcatccgtggcatcgcccgcagcgccgtcggcgctgctgggcgacattcgggtactgattgaggcggcgcggcaacgcgccgcctcgacggtgaatagcgagctgacgatgctctactggcgcatcggccagcgcatccacacgcaggtgcgtattccacgcgatggcggacacgattccatgctgatggcggacagtgttccagcgtgatggcggacagtgttccacgctgaaggcggacagcattccaaactgatggcggacacctgcggggtgttctgagtgacccgaacgcggcatacgctgcccggttttttgaccggaaccagcgatgcccacacccagggtcaccatgagcaaactacgacacacactgcaactgctgcaccgcggggccttgagcacccgtcaaatcggtgccgccctcggcatctccaaatccactgtcagcgagatagccagctacgcgcgcgtggccggcgtggactgggcactggcccagagcctgaacgacgacgaactccaggcccggctctacaagccacccgtggcgcgcgagtcccggcaccttgaacccgaccacgcccacatccaccgcgaactgcgccgacctggcgtgacgctgcagttgctttgggaggaataccagcaacagcacagcgggcaggcgtacaagtacagcgccttctgcgagaagtacaaggcctgggcccggcgcctgcagcgctccatgcgccagacccacacgggcggtgacaagctctttgtggactacgccggccagaccgttcccgtggtggatgccgacactggcgagatacgccaggcccaggtcttcgtggccgtgctgggcgcatcgaactacacctacgcctgcgccaccgccagccagaaggccaccgactgggtggccagcatcattagcgcgctggagttcatcggcggcgtgccccgcctgctggtgcctgaccagccgcgcgccctcatggcccgacccgaccgttacgagcccaccgcgcaccgcctgctcgaagagctctgtgcgcactacagcctggccgtgatgcccgcgcgcccggccaagccacgcgacaaacccaaggtggaggtcgctgtgcaggtggtcgagcgctggattctggccaggctgcgccaccagaccttcttcagcctggccgagctcaaccgggcgattgccgccttgctggtggacttgaaccagcgcgcgttcaagaagctgccgggcaaccgcactagcgccttcgccgaactcgaccggccagccctgcgccccctgccgccggtgcgcatgcccatcgcgcgcttcaaacccgcccgcgtcaacatcgattaccacgttgagctcgatggccactactactcggtgccccacgccctggtgggtgagccggtggagttgcgcatcacggccggcacgctcgaagtcctgcacggcagcaaacgcgtggccgcccacgccctcaatccccgacggggtgcacacaccaccacgcccgagcacatgccggcctcgcaccgggcgcacctgcagtggacgccggccaagctcatcgcctggggtgagcgcgtgggcgcggccaccgccgccgtggtgcgctggcagatggagcaccgccagcatcccgagcagggttaccgctcctgtctgggcctcatgcgcctgggccgtgagtacggggctgaccggctggaggccgcctgtgcgcgggcgcagtcgattcgctcaccgtcctacaagagcatcgcctccatcctgggctgcggcctggaccagcggccgctggatgcgccgatggccgcacaggcgaacctgccgctgcacgagaacgtgcgcgggccgggctactaccactgaactccaacgtgcaagcaaacctaacaaggaagaaccatgctcaacgaacagaccttgaaccaactgcgcgccctgcgcctggacggcatggtggccgccctcagcgacgcggccacccacatcacggccagcgagctgccctttgaacaacgcctggcgctgctggtgcagcgcgaggtggactggcgtgacagcaagcgcctggagcgcctgttgaaggcggcccgcctgaaggtctccagtgcctgcctggaggacatcgactggcgcgccagccggggcctgagccgagaggtcatcaccagcctggccggcggggactggctgcgccatggccacaacgtgctgctcaccggcgccaccgggtgcggcaagacgtggctcgcctgcgcactggggcagcaggccgcgcgcctgggcttctcggtgctctacacccgcgcgccacggctgctgcaggagctgcacgtggcccacggcgatggcagcctgggcaaacggctggcgcaactggcgcggctggacctgctcatcctggacgacttcggcatcgcgccgattgccgcgcacgagcgaaacgacctgctggaattgctggacgaccgggtgggcacgcgctcgacgctcatcaccagccagttgccggtgacggcctggcacgcctggctggacgagcccacgctggccgacgccatcctggaccgcatcgtgcacggctcgcacaagatagccctcaagggcgagtcgatgcgcaagctcaccaaggccgtctgagccggccgcgccgaccgccattccacgctgatggcggacacttcggctacgatttgagcgtcactcaggacacccgcgcaacgtgtccgccatcgcctggaacgctgtccgcgatgggaatggaatcactgtccgccatcagtggaatgcgcacgcaggtcttggacgggcgccggggcgcttatggcaaggaagtcttgcctaccctggcggcgcagttggtgaaggagtacggcagcagctttgcggagcaaaacctgcgccgcatggtgcagttcgccaccaccttccccgacgagcagattctcgtatcactgatacgagaattgagctggacgcacttcattgccctgatcccgctgaaagacccgctccagcgggactactacgcgcagatggcgagcgccgagcgctggagcgtgcgcacgctgcgcgagcgcatcgactcgatgctgtacgagcgcacggtactgtcccaaaagccgggcgagacgatcgcgcaggagctggcgacgatgcgcgatgcgcagcgcatgtcgcccgccctggtcatgcgtgacccgtacatcctcgacttcctgggactgcgggacacatggcaggaaggcgacttggaggcggcgatcatccgcgaaatggaatccttcctgttggagctgggcgcaggtttcagcttcgtggctcggcagaagcgcatccaaattgacggcgaagatttccaccttgacttgctgttctacaaccgcaaactgcggcggctggtggcagtggagttgaaggtcggcgagttcaaggcggctttcaagggacagatggagctttaccttcgctggctggacaagcacgaacgggagccggaggaagcctcgccgctgggaatcatcctttgcaccggcaaaaagcgcgagcagatcgaattgctggagctggacaagtcgggcatccacgtcgccgagtacctgaccgccttgccgccgaggggcgtgctggtggagcggctacaacaggcaacgcagcgggcgcagttgcagatcgagcagcgcaagaccgacaacgagtagccctgccccaagcagtcgggcgtcccggcgtgccgccgtcgggttcgcgggctgcgccccgcgcttcgtgccgaatcgcggccatccggctttggcccctgccgcctccggccctgccgggcctgcgtgcttcgcttgcccaaaagacgacagtgtgcagtgggcggggtgtgggcggtcttgctgttcccttcaccgtatcacggcgttctcgccgtcaagggcggcgcgtgccatgcacgcttgcgtcctggcggccgtctgcgacccctgactgcttgcgctgcgccgtgctggccacggttccgggcaattccgcccgagcaaccggagcacgatcatgtcgcaactgtccttttcctcgttcgatgcctcgctgatggtgcgcgatgcacagggccgctacctgctggcgacggccgaccaaattctggaggccgcgcgccaggccatcgagtacaagatgcagcgcggtgcgtcgttcagttcgccggtggcggtcaaggagtacctgagcgccaagttggctggtttcgagcatgaagtcttcgctgtgctgttcttggatacgcagcatcgcctgatcgaatacagcgagcttttccgaggcaccatcgacagtgcatcggtgtatccacgcgagctggtcaaggaggcgctgcggctcaatgcggcagcggtcatcgtttcgcacaaccatccgagcggcaaccccgaaccgagcggcgccgacaaggtactgacccagcggctcagggaggcgctggcgctggtggatgtccgcacgctggatcacatcatcgtggcgggtggcagcaccatatccttcgccgaacgcggtctgatttgaccgagggggcttcggcccccattttgctgcgatggcggctctcagatcgctgcttgattgacgcgccggctcagggcttcggcgctttccttgcgttcgctgtagcgatctaccagatatggcgccacgtcgcgcgtgagcagcgtgaacttcatcagctcttccatcacatccacgatgcggtcgtaataggccgagggcttcatgcgtcccgcttcatcgaactcctggtatgccttggcgaccgaagactggtttgggacggtcagcatccgcatccagcggcccaacacgcgcatttggttaacggcgttgaaggactgcgatccacccgacacctgcatcaccgccaacgtcttgccctgtgtcgggcgcaccgcgccgaccgacagaggaatccagtctatttgggtcttcatcaagccggtcatggcaccgtggcgctcgggcgaactccacaccatgctttcggcccattgcaccagttcgtgcagttccctgacctttgggtgatcgtgaggcgcgtcatccaccaacggcaggcccgaggggttgaacatccgtgtctcgccgccgagcgcgctcaggatgtgtgccgcttcttcagcagccaggcggctgaacgagcgttcgcgcagcgagccatagagcagcaggaagcgcggcgcgtgggtggcacgctcgggtgccattaaccgctgggcatcgggttgctggaacagcgcggtgtcgatattgggtaggtcgattctggattcagacacggcggccttccgcattcacgacggcttcgccgtcttccttgctgaatgcaccgcgctgcggctggggcaggatgtccagcaccgcttccgaaggtctgcacagcagtgcgcccagcggcgagaccacgatggggcggttgatgaggatggggtgctggagcatgaagtcgattaaatgttcgtcgctccatttggaatcatccaggcccaattccgcataaggtgtgcctttctcgcgcagcaccgcacgcactggcacacccatcgcagcgatcagcgttttcagcgtctcgcggtcgggcggtgttttcaagtattcgatgatggtcggctcttcgccgctgttgcgaatcaagcccagcacgttgcgcgacgtaccgcagtcggggttgtgatagatggtgatctggctcatgccattgcctcggttcagggattcgtggggttggcggaatacatgctggcgcccttgagccgccaccggcggcccaaccgcaaggcgacatgcaccagcaggatgagcaccggcacttccaccagcggcccgatcaccgtggtgaaggcgacaggcgaagccaggccgaacgacgcaatagccacggcgatggccagctcgaagttgttgcctgcggcagtgaaggcgatggcggtggtgcgtgggtagtcggcctggatcagccggcccataaagaaactgatgaggaactggatcacgaagtagagtgtcagcggcacggcaatctttagcgcgtccatcggcaggcgcaccacgtcggcacctttgaggctaaacatggccacgatggtgaacagtagcgccgccagcgtgatgggactgatccgcggcaggaatgcacgctcgtaccagtcctggcccttgcgtcgaatcagcgagcgccgggtcaggtagccggccaggaacgggatgcccaggtaaatcagtaccgcctcggtgatcgtccaaaagcccacgtcaatgacgctgccttgcaggccgaacacaggcggcagcaccgacaggaagaaccaggcataggtcgagaagaacaggatctggaagatcgaattgaaggcgaccaggcccgcgacatactggttatcaccacgcgccaactggttccacacaagcaccatagcgatgcagcgtgccagtccaatcaggatcaggccggtcatgtattccggctggtcgcgtaggaaaatcaccgccagcacgaacatcagcaccggcccgatgatccagttttgcaccagtgacagcaacagcacgcgccggtcggcgaagacctcgtgtagcgtctcgtagcgcaccttggccagcggcgggtacatcatcaggatcaggccgatggcgatcgggacgttggtcgtgccgatcgagagcgcattgagcgcatcgggcaaaccgtcgaagaacgtacccaatgcaacacccagcgccatcgcggcgaaaatccagacggtgagatagcgatctaggaaggacaggcgcgatggcgtgttcagcatcgaatgcccgctttgggggctgtcgtgattcatgaggttttcctgtttgccaaagcccgcagacgctccactcccaccggctcttcggtcagaagcggcacgacagcatggcgtcgggcatgttgtgtggccacggcgtcgatttcccgcaactcgttgcgtgcacgctggcgcagcagcggggaatgcggatgtgcggccgccacgctgttgttaacgatccaggcccacggctcgatgcccgcgcggcgcaggtcgtcttgcaggttggccgcttccagcacgggcgtggtttcggccagggtgacaatgagcaccttggtctgcttcggatcttgcaactgcatcatcggcgtcgtgaaatgaacgcccgtctcacccatctgccgggcgatgtcgcggtggtatgcgccggtggcgtcgagcagcagcaaggtgtggcctgtgggcgcggtgtccatcaccacgaactttctgcccccttcgcggatggcacgggagaatgcctggaacaccgcgatttcctcggtgcagggcgagcgcaggtcttcttccagcaaggcgcggccttcggcatcgagctgcgcgcccttggtgtccatcacatgctggcgatagcgtgccgtggcttcctgggggtcgatgcggctgagagccagattgggaagcgaaccttccagcgtgtcggccagatgcgcagccgggtcggaggtggtcagatgcacgggcaggccccggcccgccagctccacggcaatggcagcggccagcgtggtcttgcccacgccgcctttgcccatcaccatgaccagaccgtgcccatcggcagcgacttcatcgaccagggcggataagtccggcgcattgatctggtcgggcagctcgatggcatcggcgccatatgtggcgtcggtatcgaccagcagatggcgcagagcgtcgaggcccacgaggttgaacggcttgagcgcgatctgatcccgaggcaacgcctggaggacagacggaatggcggccagcgtagcctgctctttttcgtagatggcagcggcaagcgtatcggtttcggcctcgctggcaggaaatacgccgttgatgaccaggtgttgctgtgacaggccgatagcggccagttcttcatgggtgcgggccgcctcgcgcagcgtggggcgctgcgcacgggcaaccagcactagacgagtgcgcaagggatcggccaacgcctctaccgcagccttgtactgactgcgctgtttttccaggcccgccagcggccccaggcacgacgcatcgcctttgcctgcttccagaaagccactccatgcgcccggcagttgcagcaggcggatggtgtggccggtaggggctgtgtcgaaaatgatgtgcgcgtaatcctgcgtcagcgccgcatcggtcagcagggccgtgaactcatcgaaggcggcgatttccgtggtgcaggcacccgacagggattcttcgatgccatccactaccgcatcgggcaacacgcctcgcactgggccgactatgcggtcacggtacgcttgcgcggctgcctgcgggtcgatttccagtgcccatagattcggcacggcggcaatcatcgtgatgtggtttccgatgcgttcgccgaaaacctgccccacgttggaagccgggtcggtactgacgagcagcacacgcttgccctgggtcgccagttgcacggccgttgcgcaggcgatggaggtcttgccgacgccccctttgccggtgaaaaacaggaagcgaggcggctgggtcaggaagtgcatgggatctccttgttcagcagcagcggccgccagagcagcaggcgttttgggctggcgaggcttcgggcgcctcgatgccagcccagcgggtcaattcgcttcggctggggtagcgaccggccaaggccacctcaccatcgaccagaaccaggggcagcgcctcttggcccgagcgttgtaaaaagcctttcactgtcgggttttcggcgaaagcgaggggttgctgtgccaggttgaagcgttcgacctgagcaccgtgttgcttggcccaatccacatcggcggcgaagttcaccaagttttgatccacttcaacgccacatacgccggtgctacaacatagcgccgggtcgaaaatctggatgcttggcatggggtgtcctttcaaattggttgttgatgaagtgacgctcttcactcttggccgatgtttcgcaactcgcgttgcagcgacatggcgtccaggcgttgcagtggcagcgagagaaacagctcgatgcggcggcgcaaaatcagcgcggcatccttgaacgctttgagtcgttgttcttcgctaccttcgacggctgccggatcgggcacgccccagtgagccgataccggcttgcccggccaaaacgggcaagcctcgccggcggcgttgtcgcagacggtaaaaatgaagtcgaacaccggcgcccccggcgctacgaactcatcccagcttttgctgcggtagccagtcgttggcatgtgcagccgctccagcgtggcgagcgccagcggatgcacttcgcccttgggctggctacctgccgagtacgcccgaaagcgcccttggcccagtttgttgaggatgccttcggcgaggatggaacgtgcggaattgcccgtgcagatgaacagtgcgttgtatgcggcctctgtggtcatggtgtgctttctcaacagcaggaagaacgggggcttgctgtgcagcaagccggtgcggtgatcggtgtcgtgactgaagccgcttcatggaagaccgggatgctgcctaacgtgtggaagtgctcccaggcaataccctgcgggtcggtgacccaatgcttctcgctgcgtgcgtagcagcaggtggtcgtgccttcgtcgagcaacgccatgtcggcggcttgtgcgcggagtttcagggcggccagttcctcggcgtcgtcggtctggatacccaggtggtcgatgcccggctcgctgccgcgcgtggagatggcgaagttgaccggcgggtcttcgagcatccacttcgcgtagtcgccttcgacgcgcgcaggctgcgccgcgaatagttgggaatagaagccgatgctgcggttcaagtcatcgacgtgcaggtggacgtggaagcgcttcatggagagttcctttcagcaggaggcacaggtggagggagattcagtgacttcgcatacgccgccctggcagcagtgctcggtcatgtagccaagcagactgttcatctgcgcgaagtcagcgcgatagatcaggttgcgcccttgctgttcgatggtgacgaggccagcgtgagccagctccttcagatggaaggacagagagttgcgggccacgtcgagctggtcggccaagacgctgggcgtcagcccctcggggcctgcgacgaccagggcgcggaacacgcgcaggcgttgggtgtgggccagggcgccgagggcggaaacagcttgatcttcgttcatagttcgataatacaacatttattgaatcattgcgcaagaaaccagcaaacagaacctcgtagcgccccggcgtgccgccgtcgggttcgcgggctgtgtcccgcgcttcgtgtcgaatcacggccatccggctatgccccctggcgcctccgacctgggtgctctgctcgcctaaaaccgacgcatatggaggtgcaagggaggcggtcttgctgttcccttcatcgtgccacggcgtgctcgccgtcaagggctgcgcgccgatggcgcttgcgtcctggcggccgtcgttgacccctgactgcttgcgctgcgccgtgccacggaagggtcgggcaattccgcccggcaacccttcaggagttcaccatgaacaacgcactcatcactgacgagcagcgcatcgtgctgctggccaacggccgcgaatcgctggagaacccggacttcgatccggcgcccgtggtcaagctgttcacgccggatagcggcgcgacctggctgctaaccgagattgatcccgacgaccacgaccacgcctttggtctttgcgacctgggcctggggatgccggaaatcggctgggtcagcctgggcgagctggcgacggtgcgcggcgggctgggcttgccgatcgagcgcgacctgtctttccgcgccgagaagcggttgagcgcctacgcacgcgatgcgcggctggccgggcggatcgctgtctgactcggccctgggagcgccgcaaggcgctccttgtgctttctcaacctttgcaggagatccatgccatgagtagccatcacgactagatcatcgaaatcacggcgcagcacgatgcgctcaaaccgttcgcgccggagaacgggcagccgctgtgcttcaagatcggcgacgcggtgatctacaccaacgagtttggtgtgcagttctggcgccgcgtcaccgggttctaccagcccaccgagccttcggggttgtatgcgcgtggtaggcgctactacctgaactcgacttcgccgtggatgccggttgcggaatccagcctgtgtcctgacgactcggcgtgatgccttcgcgcccctgacggggcgctgcgcttgcctccaggggaaagccctgcgggccacccccgccgcgcgatgcttagcgcccctcaaagaccgccgaaccggctacgcgggatcggccagaccgaagcaatcaccggcacaactggctctgcttcccgatgcttggcgaatgagcttgtgcatcgagctttgaaatccgggcgtccccggccaagaaacatggccggtcgcgctgtcgtgctgcgcatcgaaccccctgcggggtttcgcccctgacgggcttccatcgttccctcgctccgctcggctgacgcctccggcccggcttccagcttcgggcctgcgcgcttcgcttgccgtgcggttcggcacacagggaaggccgttgccttgtcgagccgtctcccctgacttcatcaccttgtccgcgactgtagcccgcgcccgtgcgccgtcaaggcgcgcagggccgtgtcctcggcttcgcctgcgggccgcaccaaccctgcgcttgcctccttgacggcacccgttcgcgtgctcctgaccgtcgcgggcgatgaactcaggaaagacggtggcaacagggccaaccgggttcctcgtgccgaccgcaccgaacaaccgaaaggctgggctccgaatctaggaatccggtgtgcggtttgaacagcaaacccttttcgtcaggagaaagaccatgcaactcgcatcccgtttcgcttcccattccccagcactgcgcagcgactacccgctgtccgatgaccagattcgcagggtggccccgtccatcttcgcggatgccccgcatgagagccgttccgagcggtacagctacatccccaccgccacggtgctgaccgagcttcgcaaggaggggtttcaaccctttatggtgacgcagacccgcgtgcgcgatgaaggccgccgcgagcacaccaaacacatgattcgcctgcgccacgccagccagatcaacggcgcggaagccaatgaaatcgtgttgctgaactcgcacgacggcaccagcagctatcagatgctggccgggatgttccggttcgtgtgcagcaatggccttgtgtgtggcgacaccgtggcggacgtgcgcgtaccccacaaaggcgacgtggccgggcacgtcatcgaaggcgctttcgaggtgttgagcggcttcgagcgggtgaaggaatcccgtgacctgatgcgcagcatcacgctggacgaaggcgaggccgaagtgttcgcccgcgctgcgctgtcgctcaagtacgacgaccccgacaagcccgcacccatcaccgaatcgcaaatcctgatgccgcgccggttcgacgaccgccgcccggacttgtggagcgtgttcaaccgcacgcaggagaacctgaccaaaggcggattgcatggccgcagcgccaacggacgccgccaacgtacccgccccgtgcagggcattgattccgatgtgcgcctgaaccgcgccctgtggctgctggccgatggcctgcgccagttgaaagcctgattccccacgcggcaggggcaggcagcagcccttaccgcttctttcgctgctgcatttcctaaccgcaaggagttatcatcatgaacgccatcacccaaaccgaagcccgcgccgtcaataccgccgcagctatcccgctggaagccgccgacccgaccaagaacctgattctggttccgttgtcacggttggtactgcgccccacgggccgcaacgtgcgcaagaccccgcgcatgtcgattcccgaacttgccgcgagcatccagcgcgtgggcctgctgcaaaacctgattgtgattgcatccgccgatggcgagcattacgaagtcgtggccggtggccgtcgcctcgccgccttgaagctgctggcgaagaagcatcgcatcagcaaggaatgggaagtgccttgcctgctggtggccgatggaaccgcccgcacggccagcctcaccgagaacgtgcagcgggaggccatgcacccggcagaccagtttgaagccttcgcggcgctggtggccgaaggacggcccatcgaggacattgcagcggatttttccgtcacgccgctggtggtgcagcgccgcttgaagctggcgaatgtctccccgcgcctaatggccgactatcgcgccgatgccgtgagccttgaccagttgatggcccttgccatcactgacgaacacactgcgcaggaagcggcgttctacgatgccccgcaatggcagcgccacccctcgcacttgcgcgagcgcctgaccgaacgggaaatcgacgcctaccggcatccgttggtgcgctttgtcgggctggacagctacgaagccgcaggcggcgggattcgccgtgacctgttcgcggaaggtgacgcgggcgtgtatctgaccgatgccgcgttgctggaacggttggtgcaagaccggctggcaggcattgccgccaatgttcgcgccgaaggttgggcatgggtggatgccacgccgggaatgacccattccgacctgcacgccttccagcgtgcgcccagggagcgacgcgagccaatcaagcgcgaggcccaacgtatcgagaagctgcaagccaagctgcacgaactggccgaagcagtggatgccgcgctggacgccgaggacgaggacaaggccgacgcgctgcaagaggaaggcgaagccgtgggcgagcaattgcaggcgctggaagatggcttgcaggactacagtccgaacgtgaaggccgcagccggggctatcgtcaccatcgaccgcaacggcgaaaccgtgattcatcgcggtttgatgcgtgaggccgaagccaaggcgctgcgcacgctggaacgcttgcggcagggtttcggcggcgaaggcgaagccggaaacgacgacgaaggcgaggacgacgaacagcccaagatcgccgccatgtctgaccggctggcgcagcggttgagcgcccaccgcaccgccgcgctgcaaatcgaagtcgcccggcacccgcaagccgcgctggctgccgtggtgcatggcatggtgcagaccatcttgcagggcagccactacggccacgacctgccgctgggcatgagcttgaaagtgcaagaccggctggaaggcatggccccggactggccggaatcgcccgccgccgtggcactgcgcgaactgcaacaggtggcgggcgaagccttgccggaggacagcgccgaactgttcgccgcgctgctggcgaagccgcaagacgaactggtgcggctgctggccgtatgcgtggcttccacggtggacgtggtgacgccccgcaccacggtgcagcaacccggcgaggaattggcgcaggccgtgggcctcgacatggccgcatggtggcagccgaccgcagaaggctatttcaagcacgttccgaaggccgtgattctggatgccgtgggcgagtacgcgccgcagcacgtcacccggctggcgaagttgaagaaggccgacattgccagcgaggccgaacggctggccgatggcaccggctggatgcccgccatcttcaaggccgcaggcccgcaggatgccgcgcaggaggcaggcccggagcaggacgccccggaggatgccgaggcaatagcggatgaacctgccgaggcgctggccgcttgatccgcgccgaaggcatgcgccccggcctcaaccggggcgcttcgctggaaggagacacccccatgacccgcaccaccatcagccgcccgcgtatggctgcgatctacgcccccggcacggtacgcgcccgccgctggcacggcgatggcgacgtgcgcggctaccgtccgcccttgggctggacggcctgcgccgacctcaccgacattcatcccatcacgggccgcgtcttgccgcgtgccgtgtggtggctcatcgagacgaaggaataaccgcgatcagcaccgcgcccaggccgttccgtcctgggcgcggtgaaaagcaaatccgggcgcggcagtagccgcgcccggtgttcaaggtcaaggcttaaaccttatgttcatgttttttgcttcttggtgttgaaccattccttgaactcttctgcctcgttgccggttagctttgggaaaagcgacatattgaatccaagggtgattgtgctgtcattgactagggctaaacggctctttgtaacaccaagcagtccgaattcctgaacaaatccatggagaggtttgtcgattgttgcgaaatgaattcgcattttcattcctctgcttatgcccgccaactctgaaagattgacaatcaccatcaggtcggccaatgcgttataaatcctcgcatttctcttaggatcattctgtttgggtttcttaggttttagcactccatgcgcattcttgtttccatataaagtcgacaagccacacagcatgattgggtggccaatttccatatctcgcttagatgcgaaatttaaaatatcctccctaacctctttagcttgggccgggctgcgcggctgatgcaacgtatcttgtaggtatgcgacgatttctgaatttttcagaaaagagtctctctgatgagttgtgataccccaggaggcaagattgttgaaggcttcaaaaaaacctgaatcaacgcgagccttcttgaagaaccccttagctatgtcaccttcagcgaacatgccggaggatgcttgactcatgtcttgaggaatcccaagtcggccttcgatgtttgaaagaagaaggcttatggcacttccttttgtatccagtgatttaatgaaatttttatcttcgatgctgcaatttttgaagcctgatgaaattttggatacgatatttctgtcgatcatataaacacgcatgactcgacaacctccttgcctgatgagcggttcccaacgggaaaatggctaaatattcagtcatagaatgatgccgtaaattgcttgagcgtgtcggcgcacagcgccgccgggctttcgggctgcgccccgtgccggcaagccgtcacggccatgcggcttcaatccctcacgccttcgcgcctgcggcgctgcgtgcttcgcttgcctccaggggaaagccctgcgggctatccccgccgcgcgcagcttggcgccccttaataccgccgaaccggctgcgccggatcggcccggcaagcgtcccgccgcgatggacgggtgctggcgaacacgctggcgcttgctgcggcaggttgttcggatgcgtgccgtcctcaacgctggcggttctcgcccatcacgtcacgaaggacggttcacgaacatcccgcccggcatcgctatggagcttccacgccacgcctcaaaaccggcgccgcaaggtgcggcaggggcgctctcgcctgtcgttgggtggttgacctggcccgcgtcagcgggcgagccggagaagccttcgggcggggatgccgagccggccccatcttctttcggagcggttcggcccaaggcgtccttgtctcgttgtgaatcctggcgggggcgcggctgcgcctcgggcttcatggctgcaaccgtccggcgaaaacaatttccccgccgctgcgcggcttcctcgcgcagcaaattcttttcgcctcccggctctccactgcgttgcgaccgcaggcggtgcagccagcccgtcccccgccggccggatcacaacaaggacgcgatgggcgcgaaccttgttcaaccgaaaggagaaaacatcatggccaacatcggcaccttcaccgcagacaaagacggcttcaccggcacgcttcgcaccctgacgctcaacgtcaaggtcaagctggttcccaacgacaagggcaacagcgagaacgcccccgacttccgcctccaggccgccagccacgacatcggcgcggcgtggaagaagaccagcgaggccgggcgggagtacctgtccgtgaccctcgacgatccttcgttcccggcgccggtgtatgcccgcctgatcgaaggcgaggacggcacgcacgacctgatctggtcgcgcagcaggccgcaagcggcctgacggccaccccaagcatcccgcccattgcggcggggtgcagcgctgcttatcgcagcaccgaacacgcggcagcgggaaaccgtcagctcgcgcccgatcgtttctggttccggtattgccgcagtcatattcagcaggttcaatgcccgtggaggcaaatccaagatggcgtgtcggcgctgctagcaccgccgggctttcgggctgcgccccgtgccggcaagccgtcacggccatgcggcttcaatccctcacgccttcgcgcctgcggcgctacgcgctccgcttgcggaatccagtcttacacgccgacgcgcgctacggcgtgctgcgctctttcaacaccgcctcaagctcctggcgtacccgcgccagcagctcatcggtcttatccgtgctgtcgccggcataggccagcgtcagcagcgtgagcggatgcacctccatgacctcgcacagctcggtcagcttgtgcagggtcgggcttttcaagtcgcgctccagcgaactcatgtaggtgcggctagacacgtccgaaaacgcttcctggctcaagccccgcgccttcctgactgtccgtatcgccgtcgccaatgagtgtttcgctgtcaccaacttggtttccccataaaaaccaagatgacagtccattgcgccctatagggctacaatctatagtgttcatttatggctgagaggcacgctttcgtgcttttacggaaatccgcatatgcggatttcctcaaacccgtggagccacatccgtgtctttcatggcctgcacaattccgcttctgcgcttccgtgcctgtacggattcgacggcttacgccttcgtgctttcgcacgaaagcacgcatccatttcgccgcttccgtgttttggcaggaaggctcctccttgcatcgtcggattcgtgggagcgccaaccatgacccaaccgctcatcactgccgaacagcacgcacaactgctcgccgttggcgaggcgcgcgccaacggccagagcatcgacccgatgcccgtggtgcggctattcaccccggacgcgcacgcgacctggttgctggccgcgctcgatcctaccgatggcgatacggcctacggcctgatcgacctcgggatcgggatgcccgccttgggaacggtgaagctgtccgatctggctgccatcgtcgggccgtgcaagtggcccgtgatgcgcgacagttactttcaacctgcgcggcgactatcggaatacgtgcggctggcgcaggaaaacggctcgatcatggattgatgcaagccagcgcagccgggtcaaacgggcgcatcgtgactatttcggtcttacccaagaccgggcaggtctgaatccacatccttgcaccgaagcggtgcgcttctgacgcaaacagtcatgatctttggcgcgggctgctgcaccgtgcgccatgccgcgcaccattttcgtggcggcgcagccgtcgcattcagacgatttcagcaatgccccggagcgaatctgtcttgacaccagtagttacagcttaccccgatttcgatgacaacctgatggtgattcgatagctcccgcacgacggaatccaggcgacgcaccccaagcacagggaggttccgtcatgactaatcgcagcgtcgaacactggtatccgacagcggcttatctctacgttctgcaccagggcggccccgcgctggcctgggagtacctgcgccgaaaccctgactaccggcgcgactggctgcaccgccgccgccgaccagatacggcgcatcgttggggcttgcgcctgctggaagatcccgccctggatgcgcgcgacgcacatccggcgtggttccccgatcacgatggcgtgatccagctctacccggacgacgacccgccgccggatgccgatgccttcgagttctggaacgtcccaggacgcaagcacctgatccatgatggcaagcgcctgatgctgacggcgcaatggcccggctgctgcgtgcggctcacgctcacgccgagcatggccgacggaatggcctacctctacgccatccgaggctgcactacgccttgcgcacgctatcgcgcactggcggctgggctggatgcgttgtccactgcaaccggggccgcgcctgcggcggcgacccgctcgcggcccacgcacgccgcagtgctggaactgcacaccttgcaggcactcgacgcgaccctggcgggcgcgtccttgcgcgaggttgccgaggggctgttcggcgttgatgccgtcgcggccgattggcacaaagacagcgccttgcgtgcccgcgtgcggcgcttggtgcgccggggcgatgcgctgatgcgcggcggctaccgccgcctggcacagcttccgccgttcccgtcgcattaggaggggggacgtttcgcgccccctgcaaatcgtcccttagcaagaagccttgctttcttgaaagtgcctctatccggccgcgtggtgtggccgggcttgatggaggtacaccccatgcgaccctctcccttgcggcctgccgccgctactgtcgctgcgccctcgcagccccaacgctacctgaccaacgacgaagccgccgagtatctgcgcctcagtcctcgcacgctggagaagcagcgcgtgatcggcggtggcccgaagttccgcaagttcggtcgccgcgtcatgtacgcagtaagcgacctcgatgcctgggccgaccagcgcagctacgaggctacatccgacccggaatacgccgaacgccacgcgggtgactaccgtgatggccgctgatcgtcggcgcgtgggtggccttcgccatgtccggccctccagggcaagccttgccgcagtgcgaacagctcgacctgttccgcgcgctgccgggcgacatggcgccacgcgacagccaggacttgatggcctttccattcttctcgctggcgaagtcgcggcgcatcgcgccgatcgacttccgcagcgggaacatcaccatccgcgtggaaggcacggccgagcacggcatcgccacgatatgggatgccgacgttttgatttgggcggcctcgcagatcgtggaggcacgcgacgcgggcattcgcccgtcgcgctggatacacgccacgccctacgagatcctgcgcttcatcgggcgcggcacatccctcaacgactacctgcgcctgaaagcggcgctcgaccggctgcaatcgaccagtgtggccacgtccatccgagaaaccacgggcaggcgcttgcatcgcttttcgtggatcaacgaatggcgcgaactggccgatgccagcggcacgccgctgggcatcgagctgatcctgccggactggttctatgccggcgtgctcgacgccgccctggtgctgaccatcgacccggcttatttccgcttgaagggcggcatcgaacgctggctgtaccgcttggtacgcaagcacggcgggcggcaggaacacggctggcaattcgacttccggcatctgcatcgcaaatccggcagcgcggctcgcttctcggacttcgcctacgacctgcgcgtgctggtggcacggcagtcgttacccggctacgtcctcggcatcgagcgcatgccggacgacaacaccgaactgctgaccttccggcccgtgctgcatacggcacggggataactgcgggaaaagctgtggacggcctcgtgctatcaggagtacccggtatcgtgctatcgggagtacgcctatcgtgctatcaggagtacgaaaacgccgcaaagccagtaatggcgcgggttttcagcctctctaacttacctaactataaatctctaacttttagtagaagcgcaccgtttcggtggacaaccgccaaacggcacagcgaacagcgttttgcagggcaggcgaatcccggctttccagcatgggaggccgcgtcatgatcttcgcgcttctcaatcagaaaggcggcgtcggcaagaccacgctcgccacgcacatcgcgggcgaactggcgatgcgcggtctgcacgtcatcctgctggatgccgacccgcagggttcctcactggactggacgcagcgcagaagccagcagggcttgccccggctgttcagcaccgtgggcctcgcccgcgagacgctgcatcaggaagcgccggagctggcccgccgcgccgatcacgtcatcatcgacggcccgccgcgcatcgccgcattggcgcgttccgcgctgctggcggccgagcgcgtgctgattcccgtgcagcccagtccgtatgacctgtgggccagcgccgagatggtggcgctgatccgcgaagcgcaggtgttccggcctgcgctgcacgcggccttcgtcatcaaccggcgcgtcagcaccaccatcatcggcagggaagcgcggcaatcgctggccgaacagccgctgccggcgctgcgcagcgaagtgcgccagcgcatcgtcttcgccgacagcgtggccgctggccggctcgcccgcgagacggcgcccgacagcgccgccgcccgcgagatcgccgtgctcaccgatgaactgctgcggtggccgacatgagcatcccgcgcagcaagcgcgtcggcatcggcgcacgtccgcccgcgaatccgcacgccgaggcgtggattcgccagggcgatgccgatgcgctcaacaagggcgacctttatacggcccgcctgacgctcgacgtgacgcccgcgctacgtgcacgcatcaagatcgccgccttcggccagggcgtgaccgtggccgagttgctgcgcggcttgctggaacgggagttccccgacaagcgcccggagaacctgccatgaacgcatccgccttgcctgccgctcacgcggcgacggctgcaccggctgctgcgccgccgccttcgctttcgacgctcgccggccaggccggcagcgtgccgctgacgcgcgtatcgctcgcctacatcgaaccgcgcttcaagctctacctgcgtttcggcgaaccggcacgcacgttgcggctcgaccgctggcggcgctgcgcggtgttcctgccgcgtgcaatgttctgccgcgtgcgctgggaagcaaacgactacggcacgatccgctggcagctcatggtgatgcaagccgccacgccgctggacgacatgcagcgcatccccggcgtgcggcccggcgcacgcctgctgctgcacgccgaaggcgaaaacgcggtgcgtgccgtgctggaacgcatcgacggcatcgaagggcaaggcatcgccgccatcgacgtgtcgccagcgtactggcgcacgctgggcaaccgtctggcggcccgcctggcgctgcccgaatacaccgccgagcggcacgccgcctggctggccggaaaggcgctgccatgacgacccaatccaacaccccatgcacgcacgaagtcgcgccgcaacctcgctcgcgcctgcgcgttcgcatcgtgctggcgggcttcgccgccgtcggcctcgctgcgctggcctgggcggctttcgtgtcgccgctgccgcgtctgacctacaacccgtccgacagcgtggcggtcggctggtatcgcatcgaaccgttcgacccgcgcaccgcctcgctgccacgtccgttgtccgtggacagcatcgtgctggtgccgctgcccgacagggccgccatgctggctgcgcagcgcggctacctgccgacccgcgttccgctgctcaaacgtgtgggcgcggtcgcgccgcaacacgtttgcatcgtcgccgggcaggtacgcatcgacggcgtgcctgcggccgccgcgctgcctgccgaccggctgggccggccgctgccatccttgcagctttgccgccgcctcgaatcgggcgagctgttcctgttgagcgtgaccaatccagcgtcgttcgacagccgctatttcgggccggtcagcgcatccgccgtgatcggcgtcgcgcatccggtctggctggaggctcgcccatgatggccgccgactcgctgtacgttgccgtgcatcttgtcgtgccatcgggcatgccgatccagtggctttccgcgtgtcgtcgcgcgtgcagtgcgagcgcatccgcgctgcacttcgcgctgccttcccatgtgcaggcgtcttgcctcgaacgcgcccggcctgcggccgtgtccgcgttcgccggtgcgctggctgcttacgcagcagcgccgccgggccgccgctgcccggagcgccagcgaggggcaaaggcggaaggcaagacaaaaggacgcggcaccgggccgcgtcgaaagccagtctgcacgtgggggtggtgcggcacgcagcggctttgccgccgtgccgcttggggcgcgagggtcgcgccaatgcaggcatgtccgcgtgctttgcacgacaggacacgccgtagcttgcgaggagcgcagccatgaccgaccgccgcgacgacgatttccgcgtgcgccccagagccccgaagaaccggggcaagggccagggccagagcttcgtttccaaggtgctcaagcaggcgggcaaggccagcggcggcaagtcctcgatgcgtcattccgcagccggcggcggcgcacgcgccggccagcggcctggttcacgcctggggcgcggccacacggcggcgcgtttcgcgggcgcgaagctgacgcccatgtcgcggcgcgtgaccatcaagacgctgctggtcaatcaccagcgtgccagcccgcaatcgctcgccaagcacctgcgctacatcgagcgcgacggcgcgggccgcgacggcgaaccgggccgggcctacgggccgcagaccgacgaagccgaccttgacgccttcaaggagcgggccgccgacgaccggcaccatttccgcttcatcgtctcgcccgaggacggcgccgaactggacgaccttcgcacctacacccggcatctggtggaccgcatggaagccgacctgggcacgcggctggattgggtggcggtcgatcactggaacaccgataacccgcacacccacctgatcgtgctcggacgtgacgacaccggcaaagacctcatcatcgccggcgactacatcgcccacggcttccgccatcgcgccgccgaactggcgaccgaatggctggggccgcgcaccgaactggagatccagcagaccttgcagcgcgaggtggaacaggagcgctggacgagcctcgaccgcaccctgcaacgcgaggccggcgaggatggccgggtgcagatcgaacgcttcaacgaaccccggctgcaacgccagcgcctgctgctgatcggccgcctgcaacgcttgcagcgcctgggcctggccgacgatacgcagcccggcacctgggccgtccatgcggatgcggaaaagaccctgcgcgcccttggcgaacgtggcgacatcatccgcaccatgcagcgggccatgcgcggcgagccgcgcgaactggcggtgttcgagccgggagacgatggccgaaccatcctcgggcgcgttgcagcgaaggggctggccgacgagctgcgcgaccgaggctatctggtcatcgacggcgtggacggcaaggcccattacgtcgcgctcaacacccgcgacgagctggcgaactacccggccggggccgtggtggaggtgaagggatcggccgacgtgcgcgcggccgacaggaacatcgccgcgctggcgagcgatggcctgtaccgcaccgatcaccacctggcggtggcacagggcccggccgtccccggccgtgacccgcaagaggtcgtgacagctcatgtccgcaggttggaagccctgcgccgggccggcatcgtggagcgcatggccgaggggttatggaaggtgcctggcgaccttcccgagcagggccggcgctacgacgcgcagcgtctgggcggcgtggccgtggagttgaaatcgcacctgcccatcgagcgacaggtgcgcgtcatcggggccacctggctcgaccagcagttgattggcggctcgggcctgggtgatctgggctttggtgcagaggccaaacaggcgatgcagcagcgcgccgacttcctggccgaacagggtctggccgagcgacgcggacagcgcgtgattctggcgcgcaacctgttggacacgctgcgcagccgggagctgtcacaggtcgccaaggacattgccgctgaaaccggcctggagcaccggcccgtgacagacggccagcgtgtggccggcatctatcgccgcaacgtcatgctcgccagtgggcggtacgcgatgctcgatgatggcttgggcttctcgctggtgccgtggaaacccgtgatcgaacaacgcctggggcagcaacttgccgcgacggtgagcggtggcggcgtggcgtgggaaatcggacggcagcggggaatgggcattggctaatgctcgaagagtctcagccacataacccggcaggctgtctagagatatgccgaggcagttgtgaaattcttcgctgcatatcttcaacgggttggatctatggcccggaagcggccatccagatagacgagtggatcggcatatgcagatgtgagcacacgctcgacactggccagcattaccgagtgggtgccgactgcatggtgttcaatcagctcacagaacagcgaagcctgcgccccttgcagatagggcaacccattgacttcatcaaatcgccaggcttcatgatcgaaacggtcggtccccgtggcgctacggcagtgcaccgcaagtacctcctgttctgcgcggagtacattgatgcagaatcgtcgagcagccagcagcggcccatggatacgggtttgctgaccaatgcacactagaaccgtgggcggctccagtgagactgatgtgaatgaactggcgatcattacgtgtccgtggccatcgggagcgatcgacgtgattagcgtcaccgtggaggccacgccgcgcatcgcctgcctcaattgggcagcaatcaaagggtgttgggacatgtaggtgcgctcaatcataggttacgggtgcgtttcacgcttggcccaaccagggtgctttgtcagcaaacccaacatctcgtccatcgcgtcataggagcgtttgagcgtgctgtatggattccccccgaccaatgtgccgtcatagccgacggggccggtataaccgaacgacttggcaagtccaagaagtgcgaagttgtcgagttctcctgcatcgagcgcctcgaaagtggcaatacgactccagccaagtgggctgcgggttgcgccgctgagagtcaattcccgcatgaagggtgttgacgccattaacgctggcgtcgggtctactgcctgatagccctccgtcgggctgcctgcattggtttcgtagccataccagtgatagcttggaaacacgatgccgagattcggatggttcacgaccgagcagatctgtgccgcaatggagtaatgatccatccagaagcccagatgaaaatacagcaggatgttaattccgcgccgtgcgcaaatctcaagtgcccgaccaaggaagtcctgcaataccttgtcgtccggtgcctttcgatgatttgaaccgtggcctgccgtcctgattccaagattgacagccttcacgccttccatctcctcaagcatccgcaagagtcctgcgttgatgggatgctgtgggccctgatccaggtcgatcaccacatacacgctaaagacctccaaaccgaaacgatctttcacggtggatagacgctttgcggtttcccatcggctccctgaccagacggcataggtcaggccgtcataaccgatgtcagccagcatttcgcattggacatcgaaggcataggtaccagccgaagaagtaaaagcgagatcccaggcaaaaattttatgaccgtgcagcatcctgcgcctcctccaaatgggcagtagcgtgcgccggaaagtgcggtacgacatgctcgccaagttcctgaacaatctcatgcgccggacgtgtcgcgtatttcaggttgaggccaatatgattaaccccaatatcgcgcaagcggctgaagtagtcagtaaagaatcggtgaccagcccgaaacccgaggaagatgggcgacgggggttcatcgggattctccgacaggtcaatatagaaggattgcgtgaagggtttgaatcttggtgtcagcgaccgccaattcttgattgtcatggcttgctgcgcgatattttggggatagtaaagccagccatccccatgctcggcaatccattcgaccgactggcgtgaatgaccagtcaccatcacgggaatgtctctcaacgccggtttcggcagcgtatctgcacccgacaagttcactcggggcgtggagatttccgggaagtcctcacgccaggcttgacgcaacacagtcaatgcttcttggaacaacgtggctcgcgcatccattgtctgaccgaaggccgggaactctgttggccgatcacccgtggcgatacctagcaccaggcgctgatttgacaagcggtcgatcgaggctgctgctttggccacaagcaagggatgacgcagagtggtgatgacgctgccagttgcgagcgcgatgcgcgacgtctgtgccgtgacgtagcccatgaatggccacaggtcatggatgtgacccacgtcgccaaaagacgggacattgagaaatacgggtatacggatttaatggttggggtatacggatttaatggttgatggggcaccttcaccccatcaatctgataccaccctcagatggttgatagatcgactccgtagttgagttcctctgcgaagtccggcagtccgtaaccgatggttttcttgtagaaaggagagaccttcgcagtcggtgccttcttcttgtgcttcgtggtgtagagcattcgtgcccgcatcacctcgaaggagtaaccgcgcccttcacggttcttgtccttggccagtcggttgatggactccgtgtaagcgttggtgacgggcatgtccgtctcgaagtaggtcatggtctcttcgcgccagtttcccactgccctgaccagatcgctccagacttccttttggcccttcgggatggtggctatccactcgtccagggcggcttctgcctggagccgtgtggtggcgtcccagatgccgtagaagcgctccttgtgctcgtaggcggccagcagttgcgggaacgcgcctgtccaggtctccatgatgaggcgctcccggtctgagacttcgtgagcgcgtttcagcaggattttccggtctcccttgagagtccggctctgggacggtttcggctcctttctgaggcccttgcgcactctctctagggcatcgttggccatgcgcaccacatggaacttatcgaccacgatacgggcctggggcagcacagccttgaccgctgcccggtaggggttccacatgtccatgctgacgatctcgaccttctgccggtctttcagcttcatcaggtagttggtcaccacgtcctggcggcgggtggccagcaggtcgagcagggttcgctcctcaatgttggtcagaatgcagcggtagcgcttgttcaggtatagctcgtcaatgcccaggatgcggggcgtctcgaagcggtgccagcgccccaggaactcggcgcgggcgttgaagatgtcgcgcaccgtcttctcgtccaggccggtctgtgccgccacaaaggtgtaggggtggttgaaggattccttctccacgtactcatgcagccgcagtgtcatacggaatccgtccaccatctccggtagctggggcctgaatgttgtcttgcaggcccggcaggtgtatcggcggcggaccacccagagagtgacccgcttgccgtggatgggcagatcacgatagggaacgtcacgcttgccgaaccgcacgaactcaccctgcacgccgcacccctcgcaggctactggtgtaggtgcttcaagccgaaaatgtatgtcttcattctgctcatcagaatccaccaactggtacccaggaaggcttaacgaattaatcatctcccgccttgatcagaaaaacaggtaggtggcgtaaccggcaatcatcgccatagcaaaaatgactgctaaaaacgccgctaaaagcttcagcgtgaacaaagagcgcaacagaatgagctcagtcaggctggctccggcactgccgatgataaacgctagcaccgtcccggcacccacgcctttggccatcagagccgctgccagaggtatgacggcttcagcgcgaatatacaacggcacgccgatgacagcggcaactggaatggcaaagggattatctgggcctgcatactgctccaataagtcagtgggcatgaaaccatagatcacgctgccaatcgcaataccgatgagcaggtaaggcaacacatcgataaagtccgaccaagcttcccgccacacaccactgtacttcccttctttcttaaccgtgacagtgggttgactgtcacagcattcgctagacgtagagactgttgtcttcctatcagccccgcaagaagccgtcttcggagtggtgtcgcagctgttggtgccgcaactcgatgcggtcgatgtagcactgcacgggcttgctgatgaactacatccactgctctcttgtgtcgccgtccggcgcacataacgctcgaagccaagcgtgtgaagcagccatccggcacctaccgcgaccaccaaagcggcgagcacatagatagcagtaagtgtccatccaaacgtggcaaccagcaggccgacgacgataggattcagcaacggagatgagaaaagaaacaccatcatcggcccaaaaccggcccgtgcccgaatcaaccctttcaacatggggatagtcgagcaactacagaagggcgttatagctcctaaaccagcagcaagaaaatagcctcgcttcccactggaagtcagtaacgcttccaccttggatggtgggatgtgacgttgaagaactccgaccagcaagctaatgccaatgaataaaaccgatagctcgatagcgagaaaggcgaacatgcctagagcgtcttggagttgagatgacattcaatattactcctatatttctgggtcaaagagtccggcctgccggtcggcacctttgggttgttacggctgcgcgggagaggtgtcccgccgcaagcccgccaccagtacaagaaatccctgcacggctttttcggaagcggcgcgtgggtcgtctgcgctggcgatccacagcgatgcgcccagcagcgccccgtttatcaggcgggccgtcgccaggggatcgacggggcgtatgactgcctcctcgatcaacttctggaggctgcggcgcgtattcacgatgcacacgttctggctgggccactgggagggatcgcccagaaccgctggcccgtccagcaggacgatccgctggacttcgggctcgacggccatcttgatgtagccaatgcactcctgaacgaagccgtcccaggtggactccgcctcctcgacgatgacggccagtcggccagatatctctgcatcaatctgggcgatgaccgcctccagcagccctttctttccaccgaagtggtgatagagcgctccgcgcgtcagtccggcttgggccgtcagctcatccattgaactgtccgcatatcccacggttgcgaacgcagcgcgggcggcactgatgagcttggcccgcgtttcctcaatcatctctgcacgcttttgtgccattaggtcgtcctccgatttttcacataagaagtgtatgtaaatgattgacatacgttgcgtatgagtggatgataaatggcatacgtcacgtatgtcaaattttatcaaccgggtttcgccatcccttcgagactgaaaacaatgagcacattgccttaccttgcggtcctgccttcctggcgccgcgccttgccgttagctgcggcgagcttgctggcgctgtccctagctggctgcaatagcgacgccgccgacgcggtcgccgcccctccacccacggtcagcgtggcacctgtgtcggtgcgcaagatcgtccaatgggatgagttcaatggccgcgtcgaggcggtggaaggcgttgcgctgcggccacgtgtgagtggctacatcgacagggtcaattacgaagagggccagatcgtcaaacgtggcgacgtgctgttcgagattgacgctcgcagttaccgtgctgctctggctcgcgcggaagcagacttggcccgcgcccgcacgcaggccgcactggcacgtagcgaagcggcccgtgctcaaaagctggcttcgttgcaagcagcctccaccgaggagttggagcagcgccacgccgccgccgatcaggcccaagccaacgtgcagttcgcccaagccgcagtcgagaccgccaagttggatctgtcgttcacccaggtacgttcgcccatcacaggccgcgccggacgtgcactggtcacggcaggcaacttggtgagtgctgacggccaggccagcatcctgaccaccgtagtctcgctgaacccggtgcacgtgcattttgatgtcgacgagcgtacctatctgcgctacgcccacatggctcgcaacggagagcgccccgaccagcgcagcgaaagtatcccggtgcaggtgggcctggtcggcgagaacggctatccacacgccggaaacgtggacttcgtggacaaccgtgtcgatgcggccaccggcaccatccgcgcacgcgccaccctggtcaatcccgacggcctgcttacgccgggcctctatgcccgagtgcgcctgccgggtagcggcagtttcgaggccatgctgatcgacgacaaggccatcctgaccgaccagagccgcaagtacgtgtatgtgatcgatgagaacaacaccgcccagcgccgcgacatcacgctgggacgcaaggccgaaggcctgcgcatcgtcgaggaaggtctaaatcccggcgaccgcgtgatcgtcaacggcatccagaaggtttctgtcggcatgccagtgacggcccaggacattgaaatggcgcctgcaggccgacaaaacgcccaggcgagcgaatgagcgcggagagccagccatcatgaactttgcccgctttttcgtggacaggccgatttttgcggccgtgctgtccatcatcattttcgtggttgggttgatcgcgatcccgctcttgcccgtcagcgagtacccggaagtcgtgccacccagcgtacaggttcgcgccacgtatcctggcgcaaatccgcgcgaaatcgccgacacggtagccgcaccactggaggcatccatcaccggcgtggaaaacatgctctacatgaagtccgtggccggtagtgatggcgtgttggtgctgaccgtcaccttccgtcctggcaccgatcccgacgacgcccaggtcaaggtacagaaccgtgtcgcccaggcagagccgcgtcttcccgaagcggtgcgccagcaaggtgtggtgaccgtcaaacagttccccaacgaaacgctggtcgtgcagttgcgctcgccgggcgatcgctatgacgcgctgtacctgcgcaactatgccgtgctccatgtacgcgacgagttggcacgcatccagggggtgggcgatgccacgatcatcggctctggcgactacgccatgcgcttatggctggaccccgacaaaattgcggcgctgggtatgaccgccggcgatgtggtcgaagccgtgcgcgaacagaacgtccaggtctcggccggtcaactaggtgcgccgcccaacccctcgggaagcgacttcctcctgtccatcaatgcgcagggccggctggtgacggaagaagagttcggcgacgtcatcgtcaagaccggatcgcagggtcaggtcacccggctgcgagatgtggcgcgcgtggaaatggacgcatccagctactcgctgatgtcgttgctcaacaacaagcctgctgtcgcgatctctgtctttgaagccccgggcgccaatgccatcgaaatctcggatcaagtccgcgcgaagatggacgagttggccaagcgctttcccgagggagtggaatggtcgttggagtatgactcaactgtcttcgtgcgtcagtcgatcaaggcggtcgtcaacactctgctggaagccatcggactggtggtgctggtggtgatcttgttccttcagacttggcgtgcctccatcatcccactgctagccgtgccggtgtcggtggtaggcaccttcgccgtgctgctgatgctgggcttttccatcaatacgctcacgctttttggactcgtgcttgccatcgggatcgtggtggacgacgcgatcgtggtggtggaaaacgtcgagcgcaacatcgccgaagggctggcgccgctggctgcggcccatcaggccatgcgcgaagtcagtggccccatcgtcgccatctcgctggtgctgtgctcggtattcgtgcctatggcattcctgtccggcgtgacagggcagttctacaaacagttcgccgtcaccattgcgatctccacggtaatttcggccatcaactcgctgacgctgtcgcctgcgctggccgcgcgcctgcttcgcccgcatggtgccgcgccagacctgcccacgcgggtgctggatcgcagtctgggctggatattacggccgttcaaccgtttcttcctgcgcagcgcggatggctatggaaacagcgtgtcgcgcatcctcgggcggcgtggtgcggtgtttctcgtctacatcgcgctactggtggcgacgggagctgtgttcaaggccgtccctggcggattcatccccatgcaggacaagctgtatctcctcggtgtcatccagctacccgagggtgcatccctggagcgcacggaagcgctggtccgccgtgtgagcgacatcgcgctcaagaccgatggcgtctacaacgccgtgcagttcccgggcatgaacggcttgcagttgaccaacacgtccaatagcggcctagtgtatttcgtactcaagcccatcaatgagcgcaagcacactgcaaccgagattgcggaacagttgaacgagcgcttcgctcaggagcaggacggtctggcctttgccatcatgccgccccctgtcatggggctgggcgcgggttccgggttctctctttacgtgcaggatcgcaaccgtgagggctatgccgcattgcagacggcgaccaccgagctggcgacggccatctcgcaagaaccgggattccaatatccgatcagttcctatcaggccaatgtgccgcagcttgacgccgtagtggaccgcaccaaggcgaaggcacagggcgtggccgtgaccgatcttttcgatacgctgcaagtgtacctgggttcggcgtatgtcaacgacttcacgcgctttggccgcaccttccgggtgatggctcaggcggacgcaccgttccgcagttctgtcgaggacgtggtcaaactgcgcacccgcaacgccaatggcgacatggtgcccatcggcagcatggtggacgtgcgcaagacattcggccccgatcccgtcatccgcttcaacggctatccatctgccgacctgattggtgagtttgatccgcgtctggtgtcgtcatcgcaggcattgcagcaagtgcaatccattgcagacaaggtgctgccgccaggcatgcaactggagtggaccgacctcagctaccagcaggtcacgcaaagcaataccgcgctggtggtgttcccgctggcggtactgttggtcttcctggtgctggcggcactgtacgaaagctggacgttgccgctggccgtcatcctgatcgtgcccatgagcctgttgtcggccatgacgggcgtgtggctcgcgggtggtgacagcaacattttcgtgcagattggcttgatagtgctgattggtctggcctccaagaatgccattctgatcgtggagttcgcccgtgaacttgagcgcaaggggcacagcatcctcgatgccgcgctggaggcatcacgccttcgtctgcgcccgatcatcatgacttccatcgccttcatcgctggcgtggtgccgctgatggtcggttccggcgcaggcgcggagattcgccaggttatgggagtgactgtgttcgccggcatgctcggcgtgaccttgttcggtttattcctgactcctgttttctacgtcgcgttacgcaggctcgcgacgcgcaagccacgtcgccaggcaaatgtcgccatggaggccacccatgactgactccacaaggactgattccgtcatgcttcaaacgccatcccgcatccgaccatgcctacgtcggatgccacatctggtactgctccctttggtggcgttgacgctggcagcttgcgcagtagggccgaattacaaggcacctgccgcgccccaggcagtgacgtatgcccgccaagaccccgttgccgtgtcccagcttgtaccggaggccgatgcgcaattctggcgggaactggatgacccggtgctgcactctttggtggagaatgctcttcacgccaatcacgacatccgcatagcactgtcgcgctacgagcaagccagcgcactgtcgcgcgaacgtcgccaagactactatccgacgctgggcgcgtccggtgaaatcagtacccagcgcgccagtgctgcacaagcaccggatgcgtcccgctccgaccgggataacgatctgcattcggctggcctatccgtgatctgggaattggacttctttggccgagtgcggcgcagcgtggaatcgcagcgcgccgagaccgaggccagcgcagccgacctggcgggcgtacaagtggctatggtggccgagttgaccgacgcctatttccgcttgcgcggcttgcaagtgcaattacaggtcgcgcgggacaacgaaatcaaccaagccgaaacgctgcggctgatcgaggtcttgttcgagaacggccggggcacgtcgttcgatgccgaccgcgcccgcacgcaattggcgctgacacgctcgcgcattccgccgcttgaagctgaggctgctgtggccgcccaccgcattgccgtgctcactggccgcacgcctgcggcgatggccgaagtgctggatcaccccgcagccttgcctgagctgcccgcccagatcaacgccggtgcaccgggcgatctactgcgtcgccgtcccgatgtggctgcggcagaacgtaggctggctgcggccactgcgcgtatcggcgtagccatggcagacctgttccctcgctttacgttgggagggctgatcggcacgcaggcgttgggctttggttcgttgttcgagcgtgatagtgaaacgcgaatgatctcgctcggtgtgggtggttccttcctagacgtgggccgggtgcggtcgcgcatcgcggcggccaattcagccactgccgaaaacttggcggtatacgagcgcacggtgctgcgcgccatggaagaaaccgagaacgcgctggtacgcctatcgcgcgcgcagaccgagaacgccatgctggtacaggcgaccgaggccagccgccgggcagccaagacggctcgcctgcaatttgagggcggcgccatccatgttttggatgtgctggaggccgaacgttcacgcttggagtccgaagacttgctggcacaaagcgccacccgcagggcgacggcgttggtggcggtctacaagacgctggccggcggctggtcacacgccttgcccggaccgcagggcgaggcagtcgcgcagcgccacaaaagcggcgacaggcctgaactggatgaactcggtgagatgagcggctacaacgctgcgactctcaaacggcctttgtactgacaacaggaggcgaaatggagattcgacacttacgctgctttctcgctgtcgccgaagaactacatttcgcccgcgcggccgagaggctgcacatcgagcagtcaccgctgtcgcgcactatcaaggaactggaggagagcctgggcgaacagttgttcattcgtaccagccgcagcacgcggctgacacgggcgggcaagctgtttctggagcatgtgccgcgcatcttcaccgccttgcagcaggcgcgcgatagcgtgaatgcagccaccaacggcttccacggtcagttgcgtatcgcactgtccgacggcatcacgccctcgcgcctgccgtccttgctggcgctgtgtcggcaggaagaacccgaagtcgagattcgcctgttcgaggtacccttgtcgcagcagatcaagggactgcatgacgacctgtacgacgtgggctttgcccagtccgatgaagttggagaaggcatcactgccgaagccgtttggagcgatgcactgatggtggcggttcctgcacgccatccgcttttgaagcacaggcgcatcccgctggaagaagtgctgcgctatccgctggtgctgtgcgatccgcacgtatgcgaaggccatgctcgccaagtcgagcgtgtactgcgccggatagatatggagccgctgattgccgaacgtgtggcttcgtgcgatttgatgatggcgttagtgtcggcgggctttgcgctgggcctagccggagcgccgcatatcgcaggcagccgtgagcctgggattgtggctcggccgctggcgggtcgctcacccatgctgaccacttatgtgctgcaccgggaaggtggatcctcggacgtgctgtcacgctttatcgagcgtgtgcaggccatcgaatcgccggacggcatcagagccacgcccccccttgaacccgattcccaagaggaagtcgagtcatgaccatgaagcagatcgccccattcctgttggtcgccgcgctgtccgcttgcggccagtccgaaacaccgaaacaggcaaccaatgtaccgaccgtggaagagctggtcgcagatcctgcgcgcctgagggagctgcgccgccagtgcaagaccgaacgcccgacgatgggagacgtgctgtgcaaccgggtggccgaggcgacgaacaagcgcttctttggctatggaaacacgccctacacgccgccgaagttctgattgttggctttctgccgcgaatcttgatttttctttctcgacacgccgccgcgcgctcacgcctgcggcgtttttactggtttcgcctctgcatgacaccatgctttttgcatcaccttgctgccgataacggtctttgaccggcactgaaccggcaccgatcctgacgcctgcggcacgcctttgtgccgcgttttccacggggaatcagcgcaggagaaatcggaggccagggtatgcaagctcagggcgtgttgttcgggcagatcgccgccgtcttcggcatcgtgatcgccggtgtgtggggtgccacgcaatggaccgccgccgccttgggctaccagctacgcctgggcgcgccctggttcgacttccacggcacgccggtctattacccgtggaagctgttcgagtggtggttcttcttcgacgcctacgcgccgcaggtgttcgacaccggcggcatgatcgcggcgagcagcggcctgctggccgtggtggtcgccatcgccatgtcggtgtggcgctcgcgccaggcgcgcaaagtgacgacctatggctcggcccgctgggccgatgtcgccgacattcgcaaggccgggctgacgcagcccgccggcgtctttctcggccagcatgacggccactacctgcggcacgaagggccggaacacgtcctgacctttgcgcccacgcgctcgggcaagggtgtgggcctggtggtgccgacgctgctgtcctggccggcatccgccgtcatccacgacatcaagggcgagaactggcagatcaccgctggctggcgttcgcgcttctcgcattgcctgctgttcaacccgaccgatgccagttcggcggcctacaacccgctgctggaagtgcggcgcggcgcgcatgaggtgcgcgacgtgcagaacatcgccgacatcctggtcgatcccgaaggtgcgctggagaagcgcaaccactgggagaagaccagtcacgcgctgctggtcggtgccatcctgcatgtgttgtacgcgggcgaagacaagacgctgcgtggcgtcgccaactttctcagcgatccagccagcccgttcgagctgacattgcaccggatgatgacgaccaagcacttgggtgatgtgcagcatccggttgtcgcctccgccgcccgcgaagtgctcaacaagagcgacaacgagcgctcgggcgtgctctccactgccatgtcgttcctcggcctgtaccgcgatccgaccgtggccgaagtcacctcgcgttgcgactggcgcattgccgacctgatcgcttcagagcatcccgtctcgctgtatctggtagtgccgccttctgacatttcgcgcaccaaaccgctgatccggctgatcctcaaccaaatcggacgacggctcaccgaatcgctggatggcagtgatggcatccaacgccgccacaagctgctgttgatgctcgatgagttcccggcgctgggccgtctggacttcttcgagaccgcgctggccttcatggcgggctatggcatccgcagcttcctcatcgcgcagtcgctcaaccagatcgacaaggcatatgggcagaaccattcgatcctggacaactgccatgtgcgcgtgaccttcgctaccaacgacgaacgaacggccaaacgcatttctgaaaccctcggcaccgccactgaactgcgcgcccagcgcaactatgccggacacagattggccccatggctcggccacctgatggtgtcgcggcaggaaaccgcacggccactgcttacgccgggcgaagtgatgcaactgccgaccgatgaagcggtggtgatggtgtccagtgtcgcgccgatcaaggcgaagaagctgcgctatttcgccgatgccaatttcaagcagcgggtattaccgccgccttcggtgacggctggccgctatgccgatgtgccgccggcacggcctgacgactggagcggcttggcaatacctgcggttcccgcgacaccggccacggcgtccgccgatgacctggaggccttgggttcgaccgacgatggcggcccacgccgccagcccgaactgtccgaagccatcgcctatgcccccgagatggatgccccgagcagcgacctgtcgctgctcgatgacgacgacatgcccccggtgcttcccggccagatcgaccccgccctgcaacgcacggcgcgactggcttctctcgaccccaacgacggaatcgacctatgagccaataccgcctcaatctgttcatccagcacgagcacgccaaacgtctggaagaactggccgccaagaaaggcgtgtccaagtcgtccatcgtcgcggcggcgctcgcatcgtggctatcgcccgatgccggcgaccagcgtgaggccgccatcgccaaacgactggatcgcctgtcgcggcaggccgagcgcctggagcgtgaccagaacatccagatcgagacgctggcgctattcgtccgctactacctgaccgtcagcacgccggtgccggaggcccatcaggatgcggctcgcgcgcagggcaaggcgcgcttcgagcagttcgtcgaacagttaggccgccacctgctgcgtggccgcagcctggtacgggacgtggtggaagaactgcatccccaggatcgtgagttcgagatgcgcatggatgacgcggccgcgatggccgccgcccatgaacgcactgcggagcgtgcgtcatgagtgccgttcctcaaatcccgcccgaaccgcgctcatccgctgcagcatcccaggatcgccgcatccagatgctgcgcacggcgatggggccggtgatcgccgctgcgctggaagacccggacgtggtggaagtgatgctcaaccccgaccggacattgtgggtggatcggctgtcgtctggccgtgcgccgctcggcgtcgaactgcccgaagccgatggcgaacgcatcatccgcctggtcgccgcccatgtcggtgcggaggtgcatcgcggccaaccgctcttgaccgccgaactgcctgaaaccggcgaacgcttcgagggcatcctgccgcccgccgcacccggcccggcctttgcgctgcgcaagcgtgccgtgagcatcatcggtctggatcgctatgtggctgatggcatcctgaccactgggcaggccgagtttctgcgtcatgccgtgcgcgagcggcacaacatcctgatcgccggaggcaccagcaccggcaagaccacgctggccaatgccttgctggccgagatcgccgccaccggcgaccgcgtgctggtgctcgaagacaccatcgaactgcaatgcgcggcccgcgaccatgtgccgctgcgcacccgcgccggcgtcgtgtccatgaccgagctggtgcgggccacgatgcgcctgcggcccgaccgcgtgatcgtcggcgaagtgcgcggcggcgaagcgctggatctggtgaaggtctggggcaccggccaccccggcggcatcgccaccattcatgccggctccgcgttgggcgcgctgctgcgcctggagcaactgatcctcgaagtggcggtgaatccgccccgcgccctgatcgccgaggcggtcaatgtcgtgatccacatcgcaggccgcggccgcaagcgccacgtcgaaaccatttcccgcgtcgtcggtttcgacggcgcgggctaccgcctggcggatgcgctggaagcgacgcttcccgagctgccgccggttcctcttacagccgctgccgctacgccttcctcgatccctgaacaacctggagaactgccatgacgcacgttgatgctttccgtctttctgtaaacccgctttccccgctgcccatgctggcgcgtttgcatcgcctggcccgacccgcaggacaagggttgctgctcgcggtgttgatgctgttgctggcgggcacggcgcaggccgccggttcctcaatgccgtgggaaggcccgctgcaatccattctcgaatccatccaggggccggtagcccgcatcgtcgcggtgatcatcatcatcgccaccggcctggcgttggccttcggcgataccagtggcggctttcgcaagctgatccagatcgtcttcggcctgtccatcgccttcgcggcttcgagcttcttcctgtcgttcttcagcttctccggcggggccgtcgtatgagcacggccaccgatcttccgggctttgaagtgccgctgcatcgctcgctgaccgagccgatcctgctgggcggtgcgccgcgcaccgtggcgattgccaacggcacgctggccgccgccgtcgggctgggcctgcaactgtggattcccggcgtggtgctctggatcatcggccattcgctggccgtatggggcgcgcgtgtcgatccgcagttcatgcaggtcttcgcccggcacatcaagcacaagccgctgctggacgtgtgaggacgatgccatgctgaaccttgccgaataccgccaacggcccgcgctgctggccgactggcttccctgggccgggctgatcgcgccgggcgttgtgctgaacaaggatggctctttccagcgcacggcacgttttcgcgggccggacttggacagcgccacgcaaggcgagttgatcgccacatcggcgcggctcaacaacgcgttgcgccgcctgggttcgggctgggccttgttcattgaggccgaacgccggccggcggcggactacccacactccgactttcccgaaccgctgtcctggctcgtggacgaggaacgccgcgccgccttcgaggaatcagggcatcacttcgagagcggctatcacctgacgctggcttacctgccgcccgaggaatcgcgcgcccgcgcggccaagctgctcttcgagaacgcgcccggcgatggcgtggactggggcggtcgcctcgatgccttcgtggcggaagccgatcgtgtcttcgacttgctcgatggcgtgatgccggaaatcgcctggctcgatgacgccgagacgctgacctacctgcacgccgcggtttcgacgaggcgttatcgcgtgggcgtgcccgaagtgccgttccacatcgacgcgctactggccgactgcgccctagtcggtggcctggcgcccacgctgggagaccagcacctgcgcgtggtgtcggtgcggggctttccaacttccacctggccgggcctgctggacgacctcaaccgcctgggcttcgcctaccgctggagcacgcgctttctctgcctggacaaagccgaagcggaaaaggaactcggtcgcctgcgccgccagtggttcgccaagcgcaagaacgtcatcgcgctgctgcgtgaaaccatattccagcaggaaagcccgctggtggataccgacgccagcaacaaggccgccgatgccgacgccgccctgcaggaactgggcagcgatcaagtggccttcggctacctcaccgccacagtgacggtgctcgatgtcgatccagccgcggccgacgaaaagctgcgcatggtggagcgcgtcatccagggccggggcttcgtgaccatccccgaaacgctgaacgccgtggatgcgtggctgtcgtccattcctggcaacgcttacgccaatgtgcgccagcccatcgtctcgacgctgaacttggcgcacatgatgcccttgtcagcggtgtgggccgggccggagaagaacgaccatctggacggcccgccgctgatcgtcacccgcaccgatggcgcgacgccttttcgcttggtcacgcacatcggcgacgtgggccacacactggtcgccgggccgaccggcatgggcaagtcggtactgcttgccattctggccatgcagttccggcgctacttcggctcgcggatcttcgccttcgacatgggccgctccatgcgtgccacgatcctcggcctcggcggcgaacactacgacctcggtgccgatggcggcatcgcctttcagccgttggcccgtatcgacagcgagggctaccgcacctgggcggctgaatgggtggaaggccggctactgcacgaaggcgtgaccgtcggccccgacgagaaggcagccatctggtcggcgctgggtagcctcgccggtgcgccggtggaacagcgcacgctgaccgggctttccgtgctgctgcaatcgaacgcgctacggcaagcgctgtcgccctatgtgcttggcggcgcccacggcaagctgctggacgccgaccgcgaccggctgggcatggccgacgtgcagggcttcgagatggaagaactgatgcacagccccgccgccgtgcaagcggtgctgcgctacctgttcgcccgcttcgatgagcgtttcgatggtgcgcccacgctgctgattctggatgaagcctggctgttcctcgatgagccatctttcgcggcccgcatccggcaatggctcaagacgctcaggaaaaagaacgtcagcgtcatcttcgccacgcagagcctggcggacatcaaggactcgaccatcgcgcccgcgatcatcgagagctgcgccagtcggattttcttgcctaacccgcaggcgaccgagccgcagattcgcacgatctatgagggtttcgggctcaacagccggcagatcgagatcgtcgccaccgcgcagcccaagcgcgactactactaccagtcgcgtctcggcaaccgcctattcgatctcgacctggggccgttggcgctcgccttcgcgggcgcatccacccctcaagaccaacgcgacatcgaccgcgtgctgacgcaggccggcgcccccggcttcaccggcgcgtggctgcgccatcgcggcctcgactgggctgccgacctgctgccgtcctcaccggcggccgcttcgtttctcaactcccaaccactggaggtttcaccatgaagaccaagccccgtttgctgtccgtctcgctcgccgccgtgctgtcggtatcgctgctggccgtgcagcccgcgtccgcgctgacggtgttcgacccgtcgaacttcgtgcagaacacgctgacagccatccgcacgctggagcagatcaacaaccagatcaaccagctccagaacgaagcgcagatgctgatgaaccaggcacgcaatctggcgaagctggacttcaacatcgtcaaccggctgcgctcgacgctcgccaccactgagcgcctgatcgccgaggcacgcggcctggcctacgacgtgcagagcatggacgccacgttcgcccgcctgtacccggagcaatatgccgccaccatcagcggcgaccgcatggcgcaggacgcccgcgaacgctggcagaacaccttgaacggtctgcacaccgcgatgcggatgcaggcgcaggtgtcgcaaaaccttgctcaagacgaaagtgcgctggccgacctcgtgagccagagccagtcggccaccggcgctctgcaagccatgcaggcgacgaatcagcttctcgccttgcaggccaagcagtcgatccaggcgcagcagctccagatcacgcaagaccgggccgcttcgctggaactggcgcggcaggcggcggcgaccgaacgcgcccgcgaagtgcggcggcgcttcctcggcaccggcacgccgtacacgccgcagtccgtcaacttctacaacaactgacgggaggcggccatgcgatgcgcttccgtcctgctggccgtgctgctgaccgcttgcggccagcagccggtcgagaacttggccgacgccctggccgccgaccccgtgcggctcaaggcgctacgcgggcaatgcgcggctgatcggcaagccgtaggcgaggacgcctgccgcgccgccgccgaagccttccggcgacgcttcttcgccggccacaccgggccggacgaatacgaatcgctgaccgaactgccgccgattccgccgagcttcgacacgcccaccgacgacatgccagcgccgctcacctcgccggagaacacgccatgaacgacgtgaccatcatcgaccgtttcctcgatacgttctcgcgctacatcgactcgggcttcgggctgctacaaggcgaagtggcgtttctcaccgccacgctcatcgtcatcgacatgacgatcgcgggcctgtactgggccatgagccacgccaccggccagggcgaagacgtgatcgccaagctgctgcgcaaggtgctctacgtcggcgccttcgcctacatcatcggcaacttcaactggctggcgagcatcgtgttccgctcgttcgccgggctgggcctgacggccaccggctcggccatgacgatggagaattttcttcagccggggcggctggcgaaaaccggcattgacgcaggagcaccgattctggaacagatcggggacatggccgggttccccgaggtgttcgtgaacatcgaccccatcgtggtgatgttcctcgcctggctggtggtgatcctctgcttcttcgtgctggcggtgcagcttttcatcacgctgatcgagttcaagctgaccacgctcgccggcttcgtgctggtgccgttcgcgctgtggaacaagacgagcttcctggcggaaaaggtgctcggcaacgtggtgtcttcgggcatcaaagtcttggtgctggccgtcatcgtcggcatcggttcgggtctgttcgccgagttccaagcgcatcccgatgaaccatccatcgaccatgcgctggtcgtgatgctggcctcgctcgcgctgctggcgctgggcatcttcggccccggcatcgccaccggcctggtgtccggtgcgcctcagcttggcgcgggcgcgatggccggtgctgctgtcggcgctgtcggcacgggcgtcgccatcggtgccgccgcgaccggcgtgggcgccgccgtagccgccggggcacgcatggcgccagccgccgcgaagctggccggtgccggggcgcgtgccgccacctcagcggctggcaacgcgcggtcggcgttccaggcgggttccaccgctgcgggcggcggggccaaaggcgcggcggctggccttggcaatgtcgccaagaccagcgcacaggccgccagccgccgcgtcgcttctggtgcttccgcagcagggcagaagatgaccagttcctttcgtgccggctggaacggatcttcggacgatgccggtgcagccgcggcgggccaatccgccgcaagcgaggccgcagacggcgctgccaactcgcagaagcaagagcaacccgcctgggccaagcggatgcaccgccgccagcagatcacccatgccgcgaccaccaccgcccacacgctgcgcggtggcgacggcggcggctcagggcaaggcccgagcctgcgcgattccgatacctgaccctcaaggagaacacccatgcgattcaaacgaccgcaggtgcgctacgccgatacgccgcagcctgccaccccgtatcaagccgccgcccaggtgtgggacgagcgtatcggctcggcccgcgtgcaggccaagaactggcggctgatggccttcggctgcctggtgctcgcgctactgatggccggtggcctggtatggcgctcggcgcagtccatcgtgacgccttacgtcatcgaggtcgatcaggccggacaggttcgcgccgtgggcgaggccgccacgccgtaccggcccgccgatgcgcagatcgcgcaccacctggcacgcttcgtcagcctggtgcgctcgctgtccatcgaccccatcgtcgtgcggcaaaactggctcgatgcctacgactacaccaccgaccggggcgcggccgtgctcaacgactacgcccgcaccaatgatccattcgctcgcatcggcaaggaatcggtgacggtgcagatcaccagcgtggtgcgtgccagcgacacgtctttcaacgtgcgctggacggagcaacggttcgtcaatggcgcacccgctggcaccgaacgctggaacgccgtgctttccaccgtcctgcaaaccccgcgcaccgaacagcgcctgcgcaagaacccgttgggtatctacgtcaacggcctgtcgtggagccgcgaactggattcttccgaaggagccaagccatgaacctgcctttccgctttcacgctttgccgttgatcctgcttgccctcgcgggctgcgcctcgcagggcaagccgccgccgaccatctcacttgatgagccagtgctggcccagccgctgcccgaaccgctcgcgccggtggaagtcgtcgccgtccccgagccgctggcgttgccggcgcagttgaagccactgccggaggtcgatgcggccccggctgcgccggagccagccgacgagaaggtacgtgtttcccgtgccaacgccgaggcacgcatcgcacccacacgcgagggctacgtcaatgctatccaggtgtggcctttcaccgatggtgcgctttatcaggtctatgcctcgccggggcgcgtgaccgtggtttcgctccagccgggcgaggaactggtgacggtcgccgccggcgataccgtgcgctggatcgtgggcgacacgtccagcggcagcagcgacgcgctgcgcgtcaatgtgctggtcaagcccatccgctcgggcctgaaaaccaatctggtcatcaccaccagccggcgcacctacctgctggagctgacctcgacggaaaaggcatggatggcctcggtatcctgggactatccacgcgaccggatgctggccttgcagcgccagtcgcaggcggccagcgccgccgcgccagtcgataccggcctggcgttggagaagatccgcttccgttacgcggtatcgggcagcaacccgccgtggaagccgctgcgtgccttcgatgacggcgagaaggtctatatccagtttccggcgggcattgcccagggcgagctgccgccgctgttcgtcatcggcgtgcagggcgacgggcaactggtgaattatcgtttccgctcgccgtactacatcgtggatcgcctgttcggcgcggccgaactgcggctgggcggcgatggcggcgacgtggtgcgtatcgagcgcaccgatggcgtggcgcggaggaactgaccatgagccaggatgacactcccgacctcgccgctccgccggcgggcaaggtggcgcccgaggctgtggcgctgcgtgcccagccgcgtccggtcacgcgcctgaaccggcgcacgctggccatcctcgcgggcggcctgtcggtcgccgtgcttggggccacgatctggtcgctgcaaccgcatcggcgcggtacgggcgagcaaaccgagctttacaacgtcgatcgcgtctcgaagtccgaagggctggatgcgctaccgacggactactcgaagctgccgccagccttgccgcacgatgtacccgagctggggccgccgctgccgggcgacctcggcccggtcatcgtgaagtcgcagcagccggtgacagccgcctacgcggctcccggccacgacccgaacgatgcgctgcgcaaggaagccgaagctgccgcagcatcgtccgtgttcttccgctcgggtgcgcaggcggccgcgccggtcgcgcagtcgcaggccgccaccgcgccgggcttcgccgccaatgcggcgttcgacccgatggccgccgggccggcctcgacggcggcccagcctgccgatccgaccgccgtgcagaaccggcaagaccagaaggaggctttcctgaaaggcggctctacggaaacccgcaattccggcaacctgaccctgccggcttcgccgtatcaggtcatggccggaacggtggttgccggagcgctggtgacgggcatcaagtcggacttgcccggcgacgtgatcgccactgtgacagagccggtctatgacacggccaccgggcgtttcctgctgatcccgcagggttcgcgcatcctgggcaaatacaacagccaggtcagttacgggcagagccgcgttcaagtcgtctggaatcggatcattctgccggacacgtcttcgttgacgctcgacaatctggccggcgcagatccggccggctatgccggcctggaagacgatgtggactaccactggggccgcatctttgccggtgcggcgctgacgaccctgctgggcgtcggcgccgaactggccgcgccggagaatcgacaagatggcgatcgcgtcatcatcgccgggcgtgacagtttgcaggacacggtgaatcaaatcggccaggaagtgacccggcgcaacctcaacatccagcccaccttgacccaacggcccggcctgccggtgcggatcatcgtcaaccgcgacttggtgttgcggccgtaccagccgctgttcttcaatcgggggacttcacgatgagcacaaccaagaagctgcggctggggccgctgcccaagaccgaaagcgtcaagctcacctttgcctgcccggccagtcttaaaaccgacctcgaccgctacgccgcgctgcacgcgcaggcgtatggcgaggcagtcgatgcggcgacgctgatcccgcacatgctggaagcgttcatggcgggggatcggggattcagaaaaggaggggcaggcaaggccgccccgccgaagccgagttgacgatgcggacgcctctaccatccgcccacgatgaaagcgcagcccaagggctgcgctttcgctttgagcggtggcttgcgataggccgggctatgatggcggtgcgaccttgcccgctccgccgctcctaggcttgctaccgcgaagcgcctatgcggcacctagctcaaaacgcggtaagagcacaccgaggccgaaatctggcctaacctattgccccacaagacctttcgtaccgttgcatgtccgcactaacgacttgacagcggacattttttatgtccgggctgcgacgcgtgaccctttggtcacgattcctgccttcggtccgcccaagcggaggtgtctcatttacaatgcgcgacgtctctagctcctgaatgtgcttttccggcatctagcaaccgaggttttcatgatcatcaaaccgcgcgtgcgtggcttcatctgcgtcactacccatccggcaggctgcgaggccaacgtcaagcaacagatcgactacgtcgaggccaagggccccgtcgtcaacggaccgaagaaggtcctggtcatcggttcctccaccggctatggcctggctgcccgcatcaccgccgcgttcggttccggcgccgataccctcggggtgttcttcgagcgtccgggcagcgagagcaagccgggcaccgccggctggtacaactcggcggccttcgagaagttcgcccacgagaaaggcctgtatgcccgcagcatcaatggcgacgctttctccgacgaggtgaagcggctgaccatcgagaccatcaagcgcgatctcggcaaggtcgacctggtggtctacagcctggccgcgccgcgccgtacccatccgaagagcggcgaagtgttctcctcgaccctcaagccgatcggcaagtcggtcagcttccgtggcctggacaccgacaaggaagtgatcaaggacgtggtcctggaggcggccagcgaccaggaggtcgccgataccgttgcggtgatgggcggcgaggactggcagatgtggatcgacgcgctgctggaggccgacgtgctggccgacggcgcgaagaccaccgcgttcacctacctgggcgagaagatcacccacgacatctactggaacggttccatcggcgcagccaagaaggatctcgaccagaaggtcctcggtatccgcgacaagctcgccccgctgggcggcgacgcgcgcgtctcggtgctcaaggcggtggtgacccaggccagctcggcgatcccgatgatgccgctgtacctgtcgctgctgttcaaggtgatgaaggagcagggtacccacgaaggttgcatcgagcaggtcgacggcctgtaccgggagagcctgtacggcgccgagccgcgcctcgacgaggaaggccgcctgcgtgccgactacaaggaactgcagccggaagtgcagtcccgtgtcgaggagctgtgggacaaggtaaccaacgagaacctttacgaattgaccgacttcgccggctacaagagcgagttcctcaacctgttcggtttcgaggtcgctggggtcgactacgagcaggacgtcaacccggacgtgcagatcgccaacctgatccaggcctgaggcctggatccgagccgtcctcgcgacggctcccgctcccccgaaccggcgcccaggcgccggttcgcgttttcagcgaccggccacctgggcgttccgtacgccgtcgaggaaggcctggtagtgctgcgcggtttcctccgggcgttcgaccatcggcacgtgtccgcagttttccatgatcaccacgctgggccgcttcagcagcggacgcatcacctcgatgctggagacgtccagcacgcggtcgcggtcgccccacagcagcagggtcggtgcctcgatcttcggcagttccggctccagcgggatgtagcgctggcgcagttgttcgaatatctgcgcgttgaacgccgacgcggctaccgcgcgctcgccgaggtagcgcttgagcggcgccggcagcggcggttgctggacgaacacgaagtcgagcagcttctggaagtcttccggctggcgcaccaccaggggattctcgccgcgctccaggtcctcgaacagttcgctcttgcgcgccggcatcaccccggcgttgtcgatcagcgccagcgatagcacctgttccggatggcgcgccgcgtagagcgcgacgatgtgcccgcccatggagttgccggccaggtgcaggcggcgcacgccgatggcggcggcgaaattggcgactcgctcggcctgggtgccgacgtcgtagctggcctgttgcggcttgctgctgtcgccgaagccgggcaggtcgagggcgaccacatggtagcgctcggtcagcggccgggcgaagcgcagccagttgtccttgtcggcgccgaagccgtggatcagcaacagggtcgggttcttctccgagccaccttccaggtaggcgatctccaggttgtcgacctgcacgctgtgctcgctgagaccggcgagaccgcgctcgacggtgcgtacgctggcgaggagggtagccgggacgaagtagaggacgccggcggcgaccgccagcagcagaaccagaccgaggaggaatcgtttcatgggtgtccgaaggcttcaggaaaaaaggggccagcgctgaacgctagccgtgccggcccgctgtcgcaagccttgtgacgagtctaggcgtgctgccggtggtcggcgccgaacctaaggacggcggttcattcgccgggtcgatagagatgtcgatgctcggcgcggtacagcgaagagtcggcgaagccttcggcggccagcacctcgccgaccaggatcagcgcggtgcggcggaaattcctggcggcgaccttgggcaggatgtcgccgagggtgccgcgaacctgttcctggtcgggccaactggcccggtggatcaccgcgaccgggcagtcggcgccgtagtgcggcagcagttcctcgacgatcttcgccaggtgggcgacgcccaggtggatcgccagggtcgcccggtgccgcgccaggtcacccaggctctcgccttccggcatcttcgtgcgtgcggcgtagcgggtcaggatcagcgtctgggacacttcgggcagggtcagctcgcagccgagcagggcggcgcaggcggcggtggcggtgaccccggggacgatctcataggggatgccgagttcgcgcaggtggcggatctgctcgccgatggcgccgtacagggagggatcgccggaatgcacgcgggctacgtcgaggccgcggcgatgggcttgcgcgagtagctcgacgatctgttcgaggtccagctcggcggtgttcaccacctggccggcctggtgcccctcgagcagcgcttgcggaaccagcgagccggcgtagaggatcaccgggcactggcggatcaggcgctgccccttgacggtgatcaggtcggggtcgccgggaccggcgccgatgaaatagacggtcatgggagttctcgttcggtgagaagacgtgccagggcgatgctcgcccgatcgttgctgcgtttcgccccgagcagatcggcgcgaccgccacccaggcgttcggccagggccagggcggcggcctcggcgacgctggagcagccggtttcgcgcagcgcgacggcggaggggctgagcaggcgcggctcgtagtcgtgcaggacggcgggtgcgaggaaatgcaaggggcgttcgagcagcgtggccagttgccgcaggccgggttcgtcgcgtttgccgtcgatgctggcgagggcgtccagctcggccaggctgcgcccgtgttcgcccagcgttcgctccagcagcgcgcgcagatgctcggcgctacagcctcggcggcagccgatgccggcgatcagcaggctggggatgggcaggggcatgcgcgcaccggaggaaatggaaggagaggcactatggacccgcgaccggcaagggtcgcgggtggcaggcggtcaggcgtcgacgccgccccggttgcgccggaacagccaggcagcggccaggccgagggcggcccagaacagcgcattgctgaccagcgaggcgaccacgaaacgctgggccagggcttccggcgccaggctggcatggacctcgggctgcggcgcgccgaacaggtgcggcagcgccagcaggacggcgccgaccagcttcagcggccagttgccgccgaacaccagcagggccaggcccaccgcggtggcggcggcggtggcgatccaccagtactggcgttgcaccaggtcggccgcggcggtacccggcagctccggcggcaggcccagcgacggcgcaaggcagaacaccgcgtagccggccaggccccagagcaggccctgccaggtctggcccggcgcgcgcagggtgaagaggccggcgagcatcagggcgaagccgaccgccaccaccaggttgccgccggtggtggagagggtacgctgccagccgtcctccggctcccaggcctcctcgtcgtggacatgggcggcgacgccgggggcgtgttcgtggggctgggccgcgaccggctcgctcttctcgtaggtctccgcctcgaggatcagcggggtgacccagagaatctgcagcagggtcagcagcagggcggcgagcaggccggcgaagccggcggtctgggcgatgcgcttgatcattctggttccctcgcgactcagtggcaggggaagccggagctgtgccgggtatcgtgggcggcgttgtgtaccgcgtcgatgtgcgagaaaccggcgaaatagaccagcagcgcgccgagcaggccggcgccgatggccaggctcagtcgcttcgacagggaggtggtggagctggcgtgcgccagggtgctgctggacattgtgcgttccctctggattggcatgggcgtggcagaggagtacgcacgaggaacgggcccggacggcccgcttcacgcttgcgcccgcccaccgcgggtgaatcaaacgaaaggttccaggccggtctccgggctcgcgcgcgatgcgcttaccgttgcgggggcagcgccggactggctcggagagcgtcaccggcttcccgtttcacctcgtgcgcgccggcacgagacacctgggacaacccgcctaggacagcatgaaggaccgccgggcgtcaaccggcccgattgaccctggcccgcgcactgcgtagccttgccggttcgaggttcctcgccggcgacggcggggctaagagggaacgcggtcgatgccgcggctgcccccgcaactgtgaacggcgatcgttccccaatgccactgcgtgacgcgggaaggcggggaaccggcggagacgccagaccgtgagccaggagacctgcctcgtcgatcccgtggcgcgatgcccggggacaagacttccatacaaccgggcggggtgatccggtggcgaatccgttgcgcggcccctgcgtccgcgccactcgtccgcatgcccgccgagctgaacaagggctgcccatgaaaaccctggcgaaactccccgtcaccatcgtcaccggcttcctcggcgccggcaagaccaccttgctccggcacatgctggacaacgccgaaggccggcgcatcgcggtgatcgtcaacgagttcggcgaactcggcatcgacggcgagatcctcaagcaatgttccatcggctgcagcgaagaagaggcgcagggccgcgttttcgagctggccaacggttgcctgtgctgcaccgtgcaggaagagttcttcccggtgatgcgcgagctggtggcgcgccgcggcgaccttgaccagatcctcatcgagaccagcggtctggccctgcccaagccgctggtgcaggctttccagtggccggaaatccgcaacgcctgcacggtcgacgcggtgatcaccgtggtcgacagtccggcggtggcggccggtaccttcgccgcccatcccgagcaggtggaccagcaacgccgccaggaccccaacctcgaccatgaatcgccgctgcacgaactgttcgaggaccagttggccagtgccgacctggtgatcctgaacaaggccgaccagctcgacgccgaggccctggcgcgggtccgcgcggagatcgccggggagctgccggcggcggtgaagatcgtcgaggcgagccggggcgagctgccgctgccggtcttgctgggactcaacgccgaggccgagctgcacatcgacggccggccgacccaccacgaccacgaaggccacgaggaccacgaccacgacgagttcgactccttccacgtcgatctccccgaggtggaggaagctgcgctgctcgaggccctcggcgagctggtggagcgtcacgacatacttcgcatcaagggtttcgccgccattccgggcaagcccatgcgcctgttggtgcagggcgtcggcaagcgcttcgacaggcatttcgaccgcaagtggctggccgacgaagtccgcagcacccggctggtggtgatcggccaggagctggaccaggccgccattgccaaccagctgcgcacagcgcttgcctgatccgtgatccccggccggggccggcgatggcgattcgccggccccagcttcttgcgtcctaccggtagaacgtccatgcacctgttgcgcacccaacccggcggcttcgttcccgacgacggcatcgcccacctggcccagactcccgccgagctggtgatcctctgcagcggcgattcgcacctcgcattgctggccgaggccgcccgtgcgctgccggacgactacccgagcctgcgcctggccaaccccatgcagttgcagaaccacgcctcggtggacctctacgtcgaggaagtgctgcggcacgcgcgggtgatcctgctttcgctgcacggcggcatcggctactggcgctacggcgtggagcaactggtggcgctggccgagcgcggcgcgctgctgatcccggtgcccggcgacgaccgccccgacccggagctgagcgccctcggcaacctgccggcggagcaggccgagcgcttctggcaatacttgcgccagggcggcctggagaacgccgggcagttctaccgctgcctggccagccagtgcctcggccgcgactacgcctggcgcgaaccgcaggcgctgccgcgggtggcgctgttccatccacggcatgccgaggcgaccctggaacactggcgtgccgactggcaggccgggcgtccggtggtcgcgttgctgttctatcgcacccacctgcaggcagccaacaccgccttcatcgcacgcttctgcgaacgcctcgcggcgcaggggctcaacccgttgccgatcgcgctggccagcctcaaggaaagcgcctgcctggcgcaggtggaagactggctggagcgcagcgacgccgcgctgatcgtcaataccaccggtttcgcccagtccaatccggaggcgcccgagttgcgtccgttccgtcgcgacgtgccggtgttgcaggcgatctgctcgctggacaaccgcccgctctggctggacaacccgcaaggcctggggccgcgcgacctggccatgcacgtggcgctgccggagctggacgggcgcatcgtcacccggccgatcagtttcaagggcctggcctggcgcagcgaacgcagcgagagcgacgtggtctgctatctcgccgacgacgagcgcatggatttcgtcgccgaactggcgcggcgctgggccgagctggcgcgcaagccaaacgcggaaaaacgggtggcgctggtgctggccaactacccgacccgcgatggccggatcggcaatggcgtcggcctggacaccccggcggcggcgctgaacatccttcgtgccctgcgccagcagggctatccggtcgacggactgcccgccagcggaaccgagctgatccgccagttgctcggcggcgtcagcaacgacctggagcatctcgacctacggccctgcgcccagagcctggcgctggacgactacctggcctgcttcgcacgcctgccggagcgcaatcgccaggcggtgctggcgcgctggggcgagccgcaacaggacccgatgttccgcgacggacggatgatggtcgccggcctgcgctatggcctgaccttcgtcggcatccagccggcgcgcggctatcagctcgatccggcggcggtctaccacgatcccgacctggtgccgccgcacggctacctggcgttctacttctggctgcgccacgcctaccgcgccgatgccctgctgcacgtcggcaagcacggtaacctggaatggctgccgggcaagggagtcggcctgtccgccgaatgctggccggacgcgttgctcggtccgctgccgaacatctatccgttcatcgtcaacgatccgggggagggcgcccaggccaagcgccgcacccaggcggtgatcatcgaccacctgatgccgccgctgacccgcgccgagagctacggcccgctgcgcgacctggagcgcctggccgacgagttctacgatgcctcgctgctcgacccgcgccgcgccgaacagttgcgcggcgagattctcgtcctcctgcgcgacaaccgtctcgaccgcgagatcggcttgcagctcagcgacgatccggacagctggctgccgcagctggacgcctatctctgcgacctgaaggagtcgcagatccgcgacggcctgcatgtgttcggcgagtcgccgagcgggcgattgcgcctggataccctgctggcgctgctgcgggttccgcgcggcgatggcaagggcgccaacgccgggttgctgaagagcctggcggacgaccttggcctgggcttcgatccgctggcctgcgacatgggcgaggcctggcagggcgcgcggcctgcctgcctggaagagcggggcggggagccctggcgtactctcggggatacccgcgaacgcctggaattgctggcgttgcactggatagaacgctgcctgggcggcgaatcgccgcctgccacctggcgtgccagcggcgaggtgttgcgcggcttgtgcgaacaggtggcaccgaccctggacgcctgtggcggggccgagatcgacgggctgctggcagccctcgaagggcgcttcgtaccggccggtccgagcggcgcgccgagtcgcgggcgactcgacgtgctgcccaccggacgcaacttcttctcggtggacgtgcgcaacctgccgaccccgaccgcctggcgcatcggcttccagtcggccaacctgctgctcgagcgtcacctgcaggaacatggcgatcacctgcgccagctcggtctctcggtgtggggcacggcgaccatgcgcaccggcggcgacgacatcgcccaggccctggccctgctcggcgtgcgaccggtctggcaggccggcagccagcgcgtcgccgatttcgagatcctcccggtctccctgctggaccgcccgcgggtcgacgtgacgctgcgggtctccgggttcttccgcgacgccttcgccaacctgatccgcctgttcgatgcggcggtgcaggcggtcgccgagctggacgaggcggaggagctgaacccgctggccgctcgcgtacgcctggaacgccagcgcctcgaggcgcagggcacggcgccggcggaggcgcgccggcaggccggctggcggatcttcggcgccaagccgggtgcctacggcgccggcgtgcagggcgcaatcgaagagcggctgtgggagacccgcgccgaccttgccgaggtctacctgaactggggcggctacgcctacggtgccgccgacgacggcacgccggcgcgggaacgcttcgcccagcgcctggaacgcctgcaggcggtgctgcacaaccaggacaaccgcgagcacgacctgctcgattccaacgactactaccagttccagggcggcatgctggcggcggtggaaaccctgcgcggcgcgccggtggccagttaccacggcgaccacagccagccggacaacccgcgcatccgcacgctcaaggaagagctcaaccgggtggtgcgggcgcgggcggtgaatccgaagtggatcgccgggatgaagcgccacggctacaagggcgccttcgaactggcggcgacggtggactacctgtgcgccttcgatgccaccagcgagctgatcgacgaccaccagtacgcgctgctggccgacgcctacctgctcgacgcggagacccgcgagttcgtccgccagcacaatccgcaagccttgcgcgacatggccgagcgcctggtggaggcgcagcggcgcgggctctggcaggagccgggggcctatcgcgaggccctggagaacctgctgctggacgtcgaagaggaatagcggagcggcatggccgctcccaccgctttcagcgccgctcggcgagccgccgggcggcgtcgcggagaatccgctcggtgccttcccagccgaggcagccgtcggtgatcgagacgccgtagcgcagttcgccgccgagcgcctggcaaccgtcgaacaggtggctttccagcattaccccgaccaggtcgctggcaccggccaggcgctggtccagcacgctggcgaggacgccgggctggttcagcgggttcttgccgctgttggcgtgactgcaatcgaccatcatccgcgtggcgatgccctggctttccagggcctggcgcacggcctgcacctgctcggggccgtagttcgaaccgtggcggccgccgcgcagcaccacatgggtgtccggattgccgcgggtctcgatcagcgccgggtgaccgtgcgggtcgaggccgaaatggcggtggccgtgggccgccgaacggatcgcgtcgcaggcgatgccgacgccgccgtcggtgccgttcttgaagcccaccggcaggccgaggccgctgaccagctcgcggtggatctgcgattcgctggtgcgcgcgccgatcgccgcccagctcagcaggtcgtcgaagtagccggcggccagcggttgcaggagttcggtggccagcggcaggccgaggcgcagcatgtccagcatcagttgccgggacagcgccaggccggcggccatgtcgtcgctgccatccaggtgcggatcgtaggcgaggcccttccagcccaccgtggtgcgtggcttttccacgtaggcgcgcatcaccaggagcaactggccgtcgagttcgtcgctcagcgcggcgaggcgttcggcgtattcgagggcggagcggggatcgtggatcgaacagggaccgactaccaccagcaggcgcgggtcgtcgccgtcgaggatggcgcggatggcgtcgcggctggcggcgacctggctggccagctccagcggcaacggctggcgggccttgagttcgagcgggctgggcaggcgttccagggcggtacgggcggtggcgctgggcagggcgacggcctggacgttcggcgaaagggtggtcagtgcggatacggatgagttcatggtctggcttcctgggctggcggcgggcgtcccgcgcgcgtcgtgccctatcgaggtgttcggcaatgtcgtgggttggcgagcggctggcggccgtcgctaaatcgccaggtgttgagcgggtagccagtgcggtagcggtatgcggtcatgatcgatgtcctgtgcgttggtctgtggttgtggccttgtgggccggaaaaacgggccggaaaaacaaaacccccggtcggggagccgaccgggggtttgcgtgtgcagggtaggcgtcccgtataccgtgggcgccgttggggtatcaggcgccggagtggctaaaccaatacccgaagaaatacgcggcacggggtgcctgcggcgcacgcgcgcgcaacgacaagccagggcgcgaggcactggaatgcaggtgcggatggcgggtgtgcggcatgggtttctcccgtgaacgagtcccgagcttactgcaagcgaggcggccggttcaacgactgtttcacggttcgataccggcgccgccggcctgatagacttggcggtccgtatttccgtccgtccgccgcaggaatccccatgagcgctaccgtgcattaccccctgtccgccgtggtcgccgccgacgaactgaagctggcgctgtgcctggccgcggtcgatccggcgatcggcggggtactgatcgaggggccgcgcggaatggccaagtcgaccctggcgcggggcgtcgccgaactgctgccggcgggcgagttcgttaccctgccgctgggcgccagcgaggagcgcatcgtcggcagcctcgacctggacgccgccctcggcgaaggtcgcgcgcggttttccccgggcgtgctggccaaggccgacggcggcgtgctctacgtcgacgaagtgaacctgctgccggaccacctggtggatttgttgctcgacgtcgccgccagcggcgtcaacctggtcgagcgcgatggcatttcccaccggcatccggcgcgtttcgtgctgatcggcacgatgaacccggaagagggcgaactgcgcccgcaactgctcgaccgtttcggcctcaacgtgcgcctcgatacccagccgccgccggccgagcgggcagagatcatccgtcgccggctggccttcgatgccgacccgcaggccttcgtcgaacgctgggaaggccagcaggacaccctgcgccgccgttgcgccgaggcgcgccggcggctggcgcggattcccctggacgatgcggcgctggacagcatcgctcgacgctgcttcgaggcggctgtcgatggcctgcgcgccgacctggtctggctgcgcgcggcgcgcgcccatgcggcctggcgcggcggcgagcggatcgaggcggaggacatcgatgcggtggaacatttcgccctgctgcatcgccgtcgccagtcgaacccgccaccatcggcggccaatccaccgccaccgcccgcggcggcccctgtcgcgctcccggagcgcactggcgacggcgaagggcagtggggcgaattgccggctcggccggtggccatggggaccgcccgcgagctgccgcgctggccaaaaaagccctgagcatccgcccgcgctcggtcatgggtgcggatgccaggagcagacccggagccctgcgcggcggacttggcggcgccctgagccagggtgcggagggcgccatccaatggttgccgaccctgctgcgcggacgtccccgacagcgccgcgacctgcttcgccagccgcgcagccggcgcccgggcgaactctggctggtgatcgtcgatgcctccgccagcacccgccggtacggcgccctggcccaggccaagggagtgttggcgacgctgttcgaggaggcttatcggcagcgcatccgcctggccgtgctgcatgccacagggcagcaggcgcaatggctctggcaggggcagaaggcctcgcgggagttgcagggctggctgcgccagctgggcgccggcggcggtacgccgctgctcgacgccctgcaccaggccgctggctggctggcgcgccgacagcggcagaaacccgccgagcatcagcgtctgctggtgcttaccgacggccgtctgcgcgactggccggcgctgccggaggctgcctgcccgagcctgctggtcgacctcgaaagcggcccgttgcgcctgggcaaggccgagcgcctggcccgggaactgggggccgagtatcggcatatcagtgaattgaacgaagtctgagggcgtttcggcgagtcctgcggctttttcggtcaaattgtatttcgactgtaattcaataaatattatgcgcgtaatatcttcctgcgatccagccaatccatctcacggagatatcctcatgtcgccgatttcagtcgttatcgccggttacgcccgttcgccgttccacttcgccaggaaaggcgcgctggtcgatatccgcccggatgacctggccgccgcggtgctcaaggggctggtggagaaactcgatctcgaccctgcgctgctggaggacgtggtcatgggctgcgcctatccggaggcggaacagggcatgaacatcgcgcgcatcgccagtttccgtgccggcttcccgcagagcctcggcggtgcgaccctcaaccgtttctgcggttcgtccatgagcgccgtccactacgccgccgggcaagtcctgctgggcgccggagaagccttcatcgccgccggggtagagtcgatgacgcgggtgccgatgggcggtttcaacctgtcgcccaatcccgcgttgctgcaggactatccggcggtatacatgagcatggggcagaccgccgagaatgtcgccgagcgctacgccgtcagccgcgtcgagcaggaagagatggccgtacgctcccacgccaaggcagtcgccgcgcgcgaggccggcttgctgcgcgaggagatcgtcgccatcgacacccccgccggccgggtcgccgaggatggctgcatccgcccgggtaccaacctggagagcctggcccagttgaagccggcgttcggcggcagcgtcaccgccgccacctcgtcgccgctcaccgatggcagcgccgcgctgctggtctgtagcgaggacttcgcgcgccgccacgggctggtgatcctggcgcggatcaaggcggtggcggtggccggttgtgcgccggagatcatgggcatggggccggtgcaggcgacgcgcaaggttctgcaacgggccgggctgggcatcgccgacatcgacctggtggagatcaacgaggccttcgccagccaatccatcgcctgcatccgcgaactggggctggacatggacaggatcaacctggatggcggcgccctggccatcggtcatccgctgggcgccaccggcgcgcggatcaccggcaaggccgctgcgttgctgcggcgcaccggcgggcgctatgccatcgccacccagtgcatcgccggcggccagggcgtggcgaccctgctggaagcggtggagtgatcgcgcgccgatgaaaaaaggcccggtggatgagccgggcctggatggggaacctgcgccggcggcccggcgcagggtagtcgcggttacttgatgaagtcgtgaccccagcgttcgatctggctggcgctcttctgcatctgcagcgaccgcgattgtgctttctggccggcggcggcgatctcgtcgtcgaccaccttggtcgacagcgacagccaactggtcacgaaggccatggcgtcgctgtggatctccagggcgtcctggttgatgttggcgatgccgtcgcacttgctgtggtagcactcgtcgtaggccttgccggcggtgccgccgtacttctgcgcctgctcttcggtcttcaggccctcggcgccggtgaacaggccgccgaaggcgatgccgctgttgaagaactcggcgtagtcggagcggaagtcgatctcggtgccttccgattgctggccgcgcaggcggaagtaggcttcgaacaggcgctcaatggcggccgagccgggcggaccctggaggccgaagtcggaaccgtcgccgtcatagatgaagttgccgaagttcggcgagccgatcatgtcgaagttcaggtaggccttgatcttcttcttctcttccggggcgaggttctgcacgtagtgggtcgagcccaccaggccggcttcctcggcgccccaccaggcgaagcgcaccttgttgaccggcagcgccttggccagcagcacggccatctccagttgggcggcgctgcccgaaccgttgtcgttgataccggggccttcgaacaccgagtcgaggtgcgcgccgaccatcaccacgttgttcgggttgccgcgacgggtctcggcgaccacgttgtaggtctcggtcttcttgcgtaccacgtcgaccaccaggtgcaactgcaggtccggggtctgcgaccaggccacgccgttgtcgtaggtggcgaagatcaccgggatgccgccctcgtaggactcgcccacggtgacgttctccaggcccttgcggtcgtcggtgttgccctggttgaagatgatcaccccggcggcgccggcggccgcggcgttctcggccttctgctcgaagttgcaggtgccgcgctggatcagcgcgatcgagccggccgggaagttggcgaagtcttccgcctcgcaaccgctggtggaggtgttgccggcgccgagggacaggtccaccgggaccaccttggcggtgacgtcgcctgcctcggtctgcgacaggtaggtgaaatccttctcccattcgtaggtgaccggctgcggcacggtggcgctcaggctacccgggcctttcgggtagtaggcggtgaacgggaagggctgcacgctgaccttgtagccggctttctgcagggtctgcttcacgtagtcgacggaggcctggtagcccggcgtggcggcggcgcggttgccgtcgttgagactggcgatgtcctccagcttctgcaggcgcttgaccacgttgctggcttgcaggcagcgcggcaggccaagcggagtgctgaccagcaacggcgatttgcagatcgacgggttgggtttgccgggcgtccagaactcggtgaactgttgcgcttccgaaggtgccgccagggatgcggcggaaaccgagagggcgagggcgccgagtgcgtatctgagattgttcttgttgctcatgagactccgttccttgtgaggcgatgatcgataagccgttgatggcatggcgctattgcccgaaatgccgcctcgggcacggcctgactgccagactaggagcgctttccgggctgtcctggcgtaattcctgaaatgtgaatttcatcaactttttgtggaagaattgctgatagctcgctggcgggatggagggcggctttctatcgttaatgcccttcggcgcgggcccatggccgttggtcggggctgggaggatggtgcagcaggaaggaaaccgtctggcgcgcggataagcgcgcgagcggaagtggctggcaccagcgctgtcacagatttgtcggaaattttgtatacatttgtctggatattttcggatcgaattgtctacagtgtgcgcacaacaataaaagcgagaacagcgcaccatgaaaacgacgtcctccggaaccccacccgttccacggcctgaagacgagaacctcggtgtcggcgccaacatggcctacggcctgcaacatgtgctgaccatgtatggcggtatcgtcgcggtccccctgatcctcggccaggccgccggcctcgcgcccggcgacatcggcctgctgattgccgcttcgctgttcgccggcggcctggcgaccctgttgcaaacgctcggcgtgccgttcttcggctgtcagttgccgttggtccagggggtgtccttcgctggcgtggcgaccatggtggcgatcatcggcagcggtggcagcggcggcattcccgcagtgctcggcgcggtgatggcggcctcgctgatcgggttgctgatcacgccgatcttctcgcgcatcaccaaattcttcccgccgctggtgaccggcatcgtcatcaccaccatcggcctgaccctgatgccggtcgccgcgcgctgggcgatgggcggcaacagccacgcgccggacttcggcagcatggccaacatcggcctggcggcgatcaccctggtcatcgtgctgctgctgagcaagctcggcagcgcctcgatctcgcgcctgtcgatcctcctggcgatggtcatcggcaccgtcatcgcggtgttcctcggcatggccgacttctccaaggtcaccgaaggcccgctggtggcgtttcccacgccgttccacttcggcatgccgaccttccaggtcgccgcgatcatctcgatgtgcatcgtgatcatggtgaccctggtggaaacctcggcggacatcctcgcggtaggcgagatcatcgacaccaaggtcgactcacggcgcctgggcaacggcctgcgcgcggacatgttctccagcatgctggcgccgatcttcggctccttcacccagagcgccttcgcccagaacgtcggcctggtggcggtgaccgggatcaagagccgctacgtggtcgccaccggcgggttgttcctggtgatcctcggcctgctgccggtgatgggccgggtgatcgccgcggtgcccaccgccgtgctcggcggcgccggcatcgtgttgttcggcacggtcgccgccagcggcatccgcaccctgtcgaaggtggactaccgcaacaacatgaacctgatcatcgtcgccacttcgatcggcttcggtatgatcccgatcgccgcgccgaccttctacgatcacttccccagttggttcgccaccatcttccattccggcatcagttcctcggcgatcatggcgatcctgctcaacctggcgttcaaccacttcaccgccggcaactccgaccagcagtcggtgttcgtcgccgccagcgagcggaccctgcgctaccaggacatcgccgccctgcacgaaggcgactatttcctcgacggcaagctgtacgacgcccagggcaacgaagtgccgctggccggcgacgacagccatggcgcgccgccgcgacggcgcagcgaaaccgctgaagccggcagcgcctgagccgcgccgcgatgaacgacggccctccttgcgagggccgttttcgttgtgcgcttcagaacagcgccttgccgcggtccaggcgctggtccaccagccatttgccgtgggcgatggaggcgcgctgggcgttttccaggtcggcgaggaaggcgaagcgcacgggcagggcgatgcgcttgctggtgtggccttcgggatcggtgatgtggcagccaccggcccagggcgtgggaatgcccggatgctcgacgacgtcggcggtgatggtgtagctgcggtgctggcagtgcaggctggccatggcatgctcctctctgtcggaggccgacccggctacctgcgcgacgcctgtggttgccacggaggagcctcggggcggcgaggttttccctgcgtgtccctacctctatagcagatcgtcgccggtccgccgcgagagccgacgaagggccgcgctcagcggcgctggcgacggccgagcatgcgctccagggtgccgtcgcggcggacccactggtggtagccggcggcgagcgcatggagcagcaccaccgaggtgctcagccacaggccgaccacgcggtgaacggcgtcgaagggcttctcgaacgcctcccagttcaggttccaggtttgcgaaatccaggcgaacagcgcggtgtccttgaagctgggtaccacgaacaggccgaagtcggtgggcaggcgggtgccgacgtagccggtgagcggcatcaccagcatcaaggcatacagcgacaggtgcgcgtagtgcgccaggcggtgctccagcggcgtgccggggaccgctggcaggcgcggcccgcgcagccgcgagacgatccgagggaccagcagcaggccgaccagcaggcccagcacccagtgcaggttgagtaccggcaggcgctgcgggtggtcgtggccgagcacccagatgacgaaataggccagcacgatcgcgccgatgaaacagaacgccatgctccagtgcagcaggcgggtggacaggctgtagacggtcgctggatgcgtcacgggaatgcctcgcagagagtgaaggcgtgcaatctatgaaacgtccggagagcgatcaaacgtatttatggataatcgataacggaaaacttaatcgaaactttcaaatgtgacgttattgcaccgaaacagtgctgcgagtcgcttttttccgaaacggaagctacttggcggaataattccgggtcgggatcattgtaagttggtttttccttcgccccggcactcgcgccacgccggcagagcctggggcggggcgcggctgacccccaagcattatcgggaaatatattccgttgtctttccgctgacgttttgccgacagcaagctgacacagatgtaattgaactcgatcgcttcgtttctatagtcttcgaacacttcgccgtgcactttcaaggacggcaagtgcatatcctgcgtcttttccgccatgacgattctcgaggtgagagcatgagtagtgagcacgatggcaaggaccaggacgacctgttctccccgttgccttacctgctggtttccggcgctgtcgtgctcatgaccctgctgctgcgctgcctgttctgcccgggcgagcagttctgatcgcccggaccgggacgactcagcgaccgcggctgaggaagtcgatcaccaggcgattcatcggcgcggcgcactcttccggcagccagtggccgcagccgggcaggacatggccttcgacgtcgtccgcataggctttcatctgctccagctggaacgtgcccatgccgccgtggccgccgccggcgagggtcatggttggcatctgcaggcgggtcttcgccagttcggcgttctgccgcacgctctcgttcaacgcgcggtagtactcgaacgaggcgttcaggctgtgcggcttggcgtacgacctggcgtacagatccagcaggcgctcgctgaacacctcggtgttgctggaatgggacttgatgaagtgctcgaggaagaagcgttccttgccggcaatcagggtttccgccaggcggtcgtcggcggcgaagaaactgaagtgccagaccagcgactcgccctgggcggtgaaggccgggaagcggtagatccgcgcgtccgggatcggcgcttccatgtacaccaggcgggcgatgtcggcctggttcttcaccaccatcgggtaggtgttccagataccgatgtcgtgggccaccaggtcgaacgggcgatccgggctgaattgccgggccagcttgtgcaggtagacggcgacctgttcgccgctatagccggtcttcggcggctcggactggccgaggccgggcaggtccggcgcgatcacggtgaagcgcttggccagttccggcatcagttggtgccattcgtaccaggtctggccgaaaccgtgtaccagcatcaccagcggcccctggccgcctttcacgtagtgcagcttcacgccgtcgacttcccggtaggcgctttcgaagccattcgggacggggaattcctcggcggcgaagccgcccagggagaaggtcagggcgatgccggccaggaggccgcggcagagtctatcgaggatcatggttgtgcttccttggtgggctcagtgagggatgtggccgccgagggacggctcggtggcagcttggcgtggcgccagcatcagcagcagggccacggccatcgccgccaggcagaccagcgcgccgacctcgccgagcggcgccaggccgctgccgtcgatcacccggctgccggcgagggcgccgatgccgatcccggcgttgcaggcggagatgttcagcgaggcggcgaacgccggggcccgcggcgcggacttcatcacccgcacctggccgacgatgaacagtgctgcctgggccacgccccaggtcgccagggtggcggcgagcagccaggcgttgccgagggtcggcaccagggcgagcatgcccagcgccatcagcaggacgaacagcagggttgcgcccagcgggctgcgatccaccaggcgcccgccgagccagttgccgagcaggcctaccgcgccgaagcccatcagcgtccagccgaccagcgaaccgctgaagccggccaggcgctggaggatgtcggccaggtaggtgtagggggtgaacatgccggtgaagaccagcagcgacagcaacaggtggccgagcaccagcggttggcgcaacacgctcgcctggctgcgcagcgagacgcccggtcgtccgggaatgcgcggcagccaggcggccagcagcagcgccttggccagggccagcgcggcgagtgcggcgaatgccaggcgccaaccccaggcgtcggcgatcagcgtgccgatgggaatgccaagcacggtggcggcgacgatgccgaagaacaccagcgccacggcgcgcccttcgcgcgaggggccggccaggtgcgcggcggtttcgctggccatggcccagaacaccgggagcgccagggccgggacgaagcgcgccacggccatcgtccagatatcgccggccacggcggccagcgcattggccgcggcgaacagcagcaggcaggcgacgaacagccgcttgcgttcgacgcccgccagcgcggcggtgaggaacggaccgaaggcggcgacgctgaaggcgaacaggctgaccagcaggccggcctgggcgacgctgacctggaggtctgcggcaagtgccgggagcaggccgacgatgacgaactcggtggtcaggatggtgaagccggcggcggccagcaggaggatcggcaatagcacggcaagactcctccgcgagcgcagccgtggccgcgcccgggaacgatgcatgggagggaagggaatcaggccgtagcggactggccgagggtcgggtaatcggtgtagccggcagcgtcgccaccgtagaaccgcgcctggttggcctcggccagcggcgcgccgagacggatccgctcgaccaggtcggggttggcgatgaacggccggccgatcgccaccgcgtcggccagtccggcctggagtatcgcttcggcacgctcggcgtcgtagttgccgcagacgatcagcggcgcgcggaagcgttcgcgcaggcgctcgcggaagccttgcgggtaggccgggccgccgctccattcccactcggccaggtgcaggtaggcgatgccgcgtcgctgcagggcttcggcgaggtaaagggtcatcgcttccggctcgtcgtcgtgcatgtcgttgatcgtgccccagggcgacaggcgcaggccgacgcgctcggcaccgaccgcggcgaccagcgcgtcgacgatctccagcaggaaccgcgcgcggttctccaggctaccgccataggcatcgctgcgccggttgctggcgctggcgaggaactggtcgatcaggtagccattggcgccatgcagctcgaccaggtcgaagccggcgtcgagcgcgttgcgtgcggcgcggacgaattcgtcgcggacccggcggatgtcttccagggtcatttcccgcggcgcgtcggccggcgccatggatccgccgccctggccatcggcgatgaacacctgggccttggcctggatcggcgagggcgcgatcggcgcctcgccgccggcctgcagcgagcgatgcgacatgcgcccgacatgccagagctgcgcggcgatcagtccgccggcggcgtgcaccgcctcggtgacctggcgccagccggccagttgcgcctcgctgtagataccgggggtgtaggcgtagccctggccgaggcgggaaatctgcgtgccctcgctgacgatcagcccggcgccggcgcgctgcgcatagtagagagcgttcagggcggtcggcacgtcgcccggctgttgcgcccgggagcgggtcatcggcgccatgacgatgcggttgcgcaaggccaggttgcctacggcgagcggggagaggagcaggttggacatggtcttttcctttcgaaggcggcagggagatggcttgaatatctgtatcggtcgctaaataatatggcgatggcaacgctcgtcaagtaaatttatagtgatcgatacaaataatggaggtcaggatggcaacgcgaggcaggccacgggcattcgacagggacaccgccctgcagcgagccatggacgtgttctgggtgcgtggctacgaaggcgcttcgctggcggccctgaccgaggcgatggaaatcaggccgcccagcctgtacgccgccttcggtagcaaggaagggctgttccgcgaagccctggcccactatctcggccagcacggccgctatcgccgggatgtcctcgatggcgcgccgagcgcccgcgagggcgtggccgagctgctccgcgagaccgtcgcgcgcttctgttccgacgagttcccgcgcggttgcctggtggtgctcgcggcgctgaccggaaccccggaaagcgaggcggtgcgggacgcgttgagcgccgagcgcggcgagtcgatccgcctgttccgtgagcgcatgcggcgcggcatcgctgacggcgacctggcggcggacaccgacgtggaggagttggcgaccttctatgccaccgtgctgttcggcctcagcgtgcaggccaaggaccgggtgccttgcgagcgcctgctggcggtggtcgaacgggcgctgcgcgcctggccctgagcgggccgcatcaggccgccgcgctgcggcgcagccattccagcagcagcgtggcaggctctccggcctgcaacggtcgcggggtcagcaggtgatagctgctgccgtcggcgaggaatcccagcggcgccgccagcaggccggcggacagatcgtcgcgcaccagttgccaggggccgatggctacgccgagtccggcgccggccgcctgcaggctcaggtagaagtgctcgaagcgctgcccttcggtcgtcgccggcgcctgtccggcgagacgggtccaggtgttccaggcttgcgggcgggtcgccgtgtgcaggcgcggtgcgacggcgcgaagcccgggcgggcctgcatcgaggtggaaatgccgttcgacgtcgctcgcccggcagaccggcccgacctgctcgtcgaacagccagtgggcatggctgccgggcggccaggggaagtcgttgcggcggatcgccaggtcgatgccgcggccgaaggcgaacggcccgccgccggcgaccagctggatcgacagtcgtggctgttcctgcatgaatccggcgatccgcgggatcagccagcgcatcagcaaggtcggttcgcaggacagcaccagcgcggtggggccggcctccgcgcgcagggtctcgccggtgcgctcgatcaggtcgagggccgggccggtgccggcgagcaggcgcctgccggcctcgctgaggaaaacccgctggccgcggcgttcgaaaagcgcacaaccgagttcctcctccagggtccgcacggcgcggctgatggcaccgtgggtcaggcacagggcctcggcggcacgggaaaagttctccaggcgggcggcggcctcgaagcagcgcagggcgttcagcgagggcaggcgacggcgcctgaatggtgagttttcctcaccatgattgtcagtattcatcgttctcgctcggcgctggagaccggtagattgtgtcgtccattctaccttggagccttccaggcatgacagagttgctagctttcctgaccatcactgtgcttgcggtgatcagccccggcgccgatttcgccatggtctcgcgcaacagcctgctgtattcccgccgcgccggcctgctcaccgcgctgggcatcggcgcgggggtgacggtacatgtcggctacagcatcctcggcgtcggcgtgctggtgcgcgagtcgctggcgctgttcaccgcgctgaagctggcgggcgccgcctacctggtgttcctcggcctgcgcatgctgctggcgcgagaggactcggtggcggaggaggtggcgggcggcgccggggtttcgtcctgggcgatgttgcgcagcggcttcctgaccaatgcgctcaatccgaagacctgcctgttcgtggtcagcctgttcatgcaggtgatcgatccgcataccgcgttgccggcgcaactgggctacggggccttcatcgcgctcgcccacgtggcctggttcggcctggtcgcctgctttctctcgagcccggcggtgcgcggccggctcctgcgtttccgccggcgcatcgaccagttcttcggcgccctgctggttggtttcggcgtcctgctgggggcgaaaagcccatgagcatggaccactgatggccgcttgccgcctttgaagcgaggccggcggctccctagaatgcgccgttcatgccgtcgccagttgagggacggtcccaggatcgcgggacgcatgggagttgcatgaagaagggagcgacgcttttcgccgtcctctgggcggtactcggcctgggcctgctggtcggtttgccggtggccatccatttcattctcggccagtacgacgaggccgggttcagcgggccgcaactggtcttcgaggaacagggccattcctacctggcgttcaccctcgacgactatcgcgccaacgaagtggacaacggcgtggtacacggcagcagccgcagctatgcccaggtggtcgacctggaggacggcagcctgcgctggagcatgcgcctggatgccgacaacgagcgcggcgacgactggggttccggcgaactgctgggccagtcgtcgcgctacctgttcttcctgcgcaacgaactctacgtactcgaccggcgcgccgccgcccctgcgctggcgttcgacgagctggagcggcgcactggcggcctgccgttgaagtcggcgccctgggggaaggacgcctatcgctacgacgaaggccggggcggattgctgatgctcgcgctggacggccgcgtctggttcctcgacggcgacagcctggccctgcgcgaagctccggaagtcgatgccgcgcggtatttccacggcgacccgccgccgccggcgaatgccgggatcgactggcaggcgccgggcctgacgcgcctgcccgacggacgcctgctgatcctcgccagcgatcacgaggcccgagcgctggagcgtggcgaggcgctgccggcagcgaaccaacgggcgcgacgccagcgcctgtcactgggcaccctggattggcggtcgccggcggagaatcgactgcgtccgctgctcgacgcggccttcctgcaggctggcctgctgcccgatccatccgctgccgaagagccgcagcggctgctcgatcgaccgtccgagcggcagcgtcagcatccgtcgctgccgtccgagccgcagccgccggaagagttcgacgagcgcgtggagcgttttcccagtacccgtgcgttccttgcggcgcgtgacgcctaccgccaggaacggcgacgctggatcgccgcgcacgatgcctggcgggaacgggtcgccgacctggaggcggcggcggatgccgagtaccgtcgccggcgcgacgagcagacgcgcgaggaggcgttgtaccgtcgctatgcctcggcgctgccgggcggcgattccaggttggcgcgccgtccctggcgagtcgacggcaactggctggtgctgcaccggcgcagcctggccgagcgtagcgagctgctgctcagctcggtgtctggcgacggcagcttgctctggaccctggagctgcccatcgagcgtcccgagcggctgttccgcctggatgcccacaacctgcttctcagcggccgtggagaggaaggcgggcggttggtgcgggtcgatctgcgccggggcagcggcatcgtccatcgcctcgggcgcggcggcgcgccattgcagcgggtcgagtggcccgaaggccaaccgtgatcgcctgcgcccagcctgggtgtctgcccagcggggcggggggccgggcgccgattcaggggttcctgaagacgaatacgccgctgtccaccaggcgcgtcaggcggatgcgcagcagcagggtgcggtgggctgcgaggaagcgcggcacctgcgccagcggaattgccaggccttcgctgtcgccggggcccaccgcggtatagccgaccggctggcgcggcggatcgaacggcggctgggccgacacgctgagcgacagggtgtccacggcgaagccggcgagcaggtcgtcgagggactcgatcgacaggtacagcgagcggtaggcggggttgtcctcgtagggatggacgtcggcgatgacctgctcgtagaagcgctgttcgaaacgccggtcgctgttcagcttgcggaagaactggatgaagtagtcgcgcacctcctggtcgaggtcgtcgcagacgtggctgaccaggttcaggtagcgcggcgagcggcgctcgatgccggggtcgagctgatcgatgcggcgctgccaggggaagcttgcgccgctgctccggtaatcggcgtcctcgacctccagcgcggcgcggatcagctccagggtatgcgggttcttcggtccgcggtccttcagcgccacgctggcgtggttctcgccgtcgacgatggcgaaggcgatctcgccgcgcgattcttccaggcgccagccgggcctggcgcgctggcggacatccagttcgaggctcaggcggcaggcgttgaggttcgccgtggcgatccgcaccgtgccgtcgccgccggcttcgttggcgatggcttcgacgccgctgtagccggcattgcccaccagcaccgtggcgagcaggcggccggcgccgtaccaggcctcggcgccgaacaggtcgcgctcggcgagttgccaggagtacggcgagcccagctccagtcccttcagcacctgggtgccggtctgcccgacgaagcggttccagcctttcagtacgcgaccgatgaaggagcgtcccttgtgcgccagcggcgagccgaagttggccggggcgagcatcaggaagcgcttgaccggcgcgctggcggggtcgaagtggcgggtcagccagtcgcgcagcaccagggcgccggtgctgtgcaccaccacgtcaaccgtgcgcggtgcccgcgacagcccctgggcggtccaggcgcgatccagggcggcggcgaggtcggcgtaggtgacgtcgtcctgcagggagatccagtcggcgaggcggatctgcgtcggcgcgctgccgaaccaggcttccagctgctcggcgaggcggcggaacgacttcgaatcgtcgctccagccgtggacgatgacgatcgaacggggcatgtccggcatcctctggggctgatccgggcgactatagatcatgcgccgcggcgacgtgccctgacctgtgaaaacgtctaggatgcggcggtcgcccccgactgccgccggcgcggcatcgccagcgcgttgctgcggcaggcgcgggacgactgtcgcggcgaccgcctgttcacttcctgcaaccgctccaacctgccgatgcggcgcctgctggagcgcgagggattccagccgagcggggtgatcgacaacctcgacgaaggtgatccggagctggtcttcgtgcgtttcctcgcgccgtcgcgctgagccccggactcatttcaggttgccggcgaggaactggcgcaggcgctcgctgcgcggcgcgccgaacacctggtccggcgtcccttgctcttcgatcacgccctggtggaggaagatcacatggctggaaacctggcgggcgaaggccatctcgtgggtgaccaggaccatggtgcgaccttcctcggccaactgctgcatgactttcagcacttcgccgaccagttccggatcgagcgccgaggtcggttcgtcgaacagcatcacctgcggctccatggccagggcgcgggcgatcgccacgcgctgttgctggccgccggagagttcgcagggatactgccgttcgaccttctccgccaggccgaccttggccaggtagtggcgcgcgcgggccacggcgtcgtcgcggttcattctcaggacgttgaccgggcactcgaccacgttctccagcaccgtcaggtggctccacaggttgaaatgctggaagaccatcgccagccggctgcggatcctctgcaactgcctgggatcggcggcgcgcagctcgcccagggcgccgggacgggtgcgcagttcctcgtcgccgacgcggatgcgcccggcacagggcttttccaggaagttgacgcagcgcaggaaggtgctcttgcccgagccggaggagccgatgatgctgatcacgtctcccttgccggccctgagcgaaacgcccctgagcacctcatggctgccgtagcgcttgtggatgtcttcgacctgcaggctgtacatgcgcgtgtctccgggagaggtcagtgggtttgcggtctgaggtaggccagccagcgcagctcgccgcggcggaacagccagatcagcaggaaggcggtgccggcgtagagcgcgccggcgatgccgaaggacaggaacggcgcataggtggcggaattgacgtcgcgggccaccttgagcaggtccggcactgtggcggtgaacgccaccgaggtggaatgcagcatcaggatcacttcgttgctgaagtacggcagtgcccggcgcagcgccgagggcaggacgatgcgccggtagagggtgaagccgcccatgccgtaggcgcgcgccgcttccacttcgccgtggggcgtgttcctgatcgcgccggcgaagatttccgtcatgtaggcgcaggtgttgaggacgaaggccagcaccgtgcagttgaagccgtcgcggaagaacgcgttgagaaagtcctgggcgcgtatggcattcaggctgtagacgccggtgtagaagaacagcaactggatgtacagcggggtgccgcggaacacgtaggtgtagagccagaccgggtagcgcagcagcgggttgccgcaggtccgcgccaccgccagcgggatggccagcaggaagccaagcgccacggcgaggatcagcagccacagggtcatcgccagtccggtcagttgcaggccgtcggtccacaggtaggcctgccagtattcgtcgagtaccgcgttcatggcagcggcctcctgacgcccagcgagctgcgccgctccagccacagcaacgcggcgttggagattgcggtgatggccaggtagatcagcccgcagaccagggtgaagtggaagaactgcagggtgcccttgccggcgtcctgggtggccttgaccaggtcgccgagaccgatgatcgagaccagcgcggtggacttgaccagcacctgccagttgttgccgatgcccggcagggcgtagcgcagcatctgcggcaggagtacccggcggaacactcgccagcgccccatgccgtaggcttgcgcggcttcgacctggccggccgggaccgcctggaaggcgccgcggaaggtttccgtgaagtaggcgccatagatgaacgccaaggtgacgcagccggcggcgaacgggtcgatgtcgacctggccgatgccgagggcgtcggtgacgcggttgaggaggatctgcaggctgaagaacagcaacagcatgatgaccaggtcggggacgctgcggatcagcgttgtatagccgctggccagggcgcgcagcgggcggttggcggcgagcttggcgctggcgccgaggagcccgatgagcacggcgccgagcagggagcccagcgccagtttcagggtcaccagggtaccggcgagtatctgcgggccgaagccgtcgaggaacatttcactctccattgcttgttgttgtcggtcgaggtgaaaagcggccggacgccgttcagggcgtgccgtagaggtcgaagtcgaagtagcgggcgttgattcgcgcgtaggttccgttggcgcggatcgtcgccagcgccttgttcaggtcctcgcgcagcgccacgtcctccttgcgcaggccgatgccgtcgccgaccccgaagtagcgagggtcgtccagcaccgctccggccagttcgaaatccttgccgaccggcttgtcgaggaagccgtagctggcctgcaccgcgccttgcagcgaggcgtcgaggcggcccatgacgaggtcggcgtagacctgatcctggttctggtaggagacgacccgcacccccttggcggcccattcggccttggcgtaggcctcctggttggagccctggccgacccccacgcgcttgccgcgcaggctctcggcgtcgggcaggagcgccgagccacggcgtaccaccaggcggctcggcgcgttggagacgcggtcggtgaaggcgatgtgctgtgcgcgtttcggcgtgatggtcatcgacgagacgatggcgtcgatcttgcgcgacagcagcgccgggatgatgccgtcccagttgctttcgacccattcgcagcgggctcgcagctccgcgcagagggcttcgccgatctcgatgccgaagcctgccaggcggccgtccggctgcttgtattcgagcggcgggtaggtcgggtcgacgcccaggcgcaggaccttgccggtccagtcggcggcgccggccggtgcggcgaggaggagggagagggcgatgctgccgagggttcttgtcattgtggttgtcctctgtcgatccgcgcgcgccaggccgcgcgcccgttgaaaaccctggctcaggccaggaagcgctcggccagtcgcacccagtagctggcgccgacggccaggcagtcgtcgttgaagtcgtagccggggttgtgcaactggcagccgctctcgccctggccattgccgatcaccaggtaactgccgggacagcgttcgaggatgaaggcgaaatcctcgctggcggtgaacggccgcagtccgtcgatcaggcattcctcgcccagccagtcgcgggccacctcgcgggcgaacgcggtctgcccgggatggttgaccagcaccggatggcaatgccggtagtcgacctccgcccgcgcgccgaagctggcggcctggccgcgggccagttcgccgatgcggcgctccagcagggcacgggtttccgcggtcagggcccggacgctgaggatcatttcggcgctggccgggatcacgttggagaccgtcccggcatggatcgcgccgacgctgacgatcgcggtgtcctgcgggtcgacgttgcgcgagacgatgctctgcaaggccagcacgatggcggagcagaccaccaccgggtcgacggtgcgctgcggcaccgcgccgtggccgccgctgccgatcacgcggatgaccacggtatcggccgaggccatgaaggggccgggatggaagccgaggtggccgacggggtatcccgggacgttgtgcatggcgaagatggcgtcgcaggggaagcgctccagcagcccgtcgtcgagcatcgcgcgggcaccgccgaggccctcttcggcaggctggaagatcagttgcagggtgccgcgccagcgcggcgactcgaccaggtgcctggccgcggcgaggagcatcgcggtatggccgtcgtggccgcaggcgtgcatcacgccgtccacctggctggcgtagggcaggccggtggcttcctggatcggcagcgcgtccatgtcggcgcgcaggcccagcgctgggccctcgccgcggcacagggtgccgaccacgccggtgcgacccaccccacggctgacctggtagccccaggcctccaggcattcggcgaccagcgcggcggttcgccgttcctcgaaacccaactccgggtgggcatggatatggcggcgcaaggtaaccatctcttcccgcagcgccgcgatggcgggcaggacggcaggctcggtcattcttcttgttctcctcaagggctccgaccggtgggcggcggggcgttgtcgaagccgatggtaggcaagcgggggactggcggggaggctcgctttggctatgatgacaacctttcgttgtcacctcggtaagcccgtgaaactccaccagttgcaagccctggtcgccagtgccgacgccggcggcatccgcgccgccgcccgcgtcctggggatttcccaggcggccgtgacccgcgcgctgcgcgaactggaaaccgaacagcatctgccgctgttcgtccgcacgcccagcggcctgaccttcaccgaatacggcaaggcgctgctgatccacgcccggctggtgctcaagcaactggagcacgcgcaggtcgaactcgaccacctgcgtggccaggccagcggccggctgtgcatcggggtgacgccttgggtggcgctgaccttcctctcggaggcggtgcaggcgttccgcgagcgcatgccggaggtgcgcctggagcttttcgaaagcctgatggcggtggcccagccattgcttcgcgacggcagcatggatttcgccatcggcccgctgcacggcgcccaggcggcccaggaattcgcctgcgagaagctgctcgactacgacaccgcggtgctggtccgccaggggcatccgctggcgggttgcggctcgatccacgagctgctggaacaggactgggcgttgaactacaccggcgacggccacgacgccctgatgcgcgagctgttctggcgccacggtgccttgatcgacgagcggcgcatcgtccgcgcgcactccgtggcgatcctgcagaccctggtggagcaggccgacatgtgcacctgggtgccggcgatcatcggcgccgccccgccgttgctcggccgggtggtgccgctggcgctgcgggaaaccttcgagccacgacggctgggcatcatcacccggcgcggcggagccctcagcaatccggcgcaatgtttcgtcgagtgcctgctgcaggtgatccgccgccacgcccgctcggcgaagaaggatgaccggcgcctgttcgaaaccctgcgcctgctagtctgattcctactggcacggacgtacggtcgctcaagatcggtcgtgctgcgaccgatagcctggaaagccacgagcgaggatgccggcatgctgcaatggttcgctaacctgtcgttccgcaggaaaatcgctctgccgatcctcctgctggcggtgcttctgctgctggtgggcgcgctcggcgtgcatggcatcgcccagctgaacgaatccaaccagcgcctgggcaagcgttttctccccggcatcgccctgctgctcaacgccgaccgcgatctctaccaggccttcgtcgccgagcgcagcctgctcgagggccacctgagcgccgagcagatcgccggcctgaggaacgatcacgcggaaaacctgcagcaggccctggatcgggtgcgccagtacgcggcgatgcagccgggcgaggcggaactggccaaggtcgccgagttcgagcgcggctatgccctctggagcgcgacctcggcgcgggtgctgagcctggcggccagcgatccgagcgccgcggcgcagctcagctacggtgacagcgatcgccagttcggggcgatgcgcgaggtgatcaaccagctcgacgagatggaagaggcggccgcggccgccgacggcgaggcgtcctccgcgctgggcgagcgccaccgctggcagcaggtggcgctggtggcgttcggcctgctggtgtgcctgtcgctggtgctggtgttccccggcctggtgacccgtccgttgcagcgtctgctgcaacgcctggaagagatcgccaacggcgatggcgacctgcgcgtgcgcctggaggtcacttcgcgcgacgaacccggccgcctcggcagcgccttcaacgccttcctcgacaagttgcagccgctgatccgcgaggtcggccgggtcaccggcgaggtcgccgattccgccggttcgctggccggcatgaccgccgccaacgatcgtctgatcaacagcgagcacgcatcggtggaccaggtcagcaccgccgcgacgcagatgagcagcgccgtccacgaggtggcgcgcaatgcccagagcgccgcgcaggtggccgatgacgcccgccggcaggcgcgcgagggcgccaacgtggtggaagcgaccatcgaggtgatccgccagttggcgcaggaagtggagagcagttccgagagcatccagcaactggcccaggaaaccgccagcatcgacgcggtgctgacggtgatcaagggcatcgccgaacagaccaacctgctcgccctcaacgccgccatcgaagccgcgcgggccggcgagcagggtcgcggtttcgccgtggtggccgacgaggtgcgggcgctggcggcgcgcacccaggattcgaccaaggacatccaggcgcgcatcgagcgcctccaggccggggtgcagaacgccgtgcgggccatgcagtcgggcagcctcaaggcgcgcgacagcgtcgagcgcgccgccggggtcgacggcgtgctggccgccaccggcgacgcggtggggcggatcaacgacctcgccgcgcagatcgcctcggcctgcgaggagcagagccgggtgatcgacgaaatcgcccgcaacatcagcgaggtgcgcgagctttccgcccaggcggcggaacattcggagcagggtaccggggccagccgccggctgtccgagctgtcctcggaactggcgcggctggtcggccgtttccgcgtctgaagcgccgcctagcgcggcgccagccagatcgccacgcctgccagtgccgccgggaccaggaagaccagcagcaggatcggcagttcttcgcgcaagccgtagccggcgtgctggacgccgacccacaggttgaccagcgcgacggccagccaggtcggcaggaacaggccggcagcgagcgccggcccggcatcccagagtttgccgaagagcaggaacaggccgagcaggacgatgccgccggcgattaccagggtcacgtgcatgaagggtttccgcaggcaggcagcgaccgccgtggcggccgctgcgtggctcacttggtggagaagccgccgttgatgaggatggtctggccggtgatccaccagccttcgctgaccaggtggcggatgaacggcaccacgtcgtcgatgtcggtcaggccggttttggagaacggcgacaaggccgcggcgttcttcaggtagtccaccgcatcggcaccttcggcggggtagaagaagggcgtgtccatggggcccgggccgaccgcggtgaccgagatgccgcgcgcgccgaactccttggaagcggcacgggtgaagtgctccaccggcgccttggtgccggcataggcggcgtagtacggggtataggcgccaagcagggaggtcaccagggtgcagatcttgccgttgtcgttgacgtgcttgccggcttcgcgcaggaagaagaacgcagacttggaattgaccgcgctcatctcgtcgtattcggtctcgctgatctcggtgatgggtttcttcagcaccttgccgacggtgttgatggcgatgtccggcttgcccaccgcggcgatggcgtcggcgaacagcttttccatggccgcggcgctggtgagatcgccctgcagcgctaccgccttggctccggctgcctgcagcgcggcgacggtggcgtcggcatcggccttgctcgcggcgctgttgtagtggatggcgatcgccttcgcgccgtgggcggcgagatcacgggcgatcagcccgcccaggttcttggcgccgccggtgatgaggacggtcttgcctttgatggagtggtcgaccatggggtgtttctcctgcggtgagtggagaacccagtctagggagggcggccttgcggagtaatcgcggcggcctggatagattgtccagaaacgccgatcaattcccgcctccggaggagcgcagccgcctgcacgaatcttctagaaccccgggacgggcgcgttatagtcgcggcgacgaaaccaacgagtgggaagacctgacgcacgatggggagccgagactggatcgacctggcccgcgacgccgagaccgggatcgagaccctgcgcgcccatttcgagggccacgcctacgatccgcactggcacgacagctacctgatcggctacaccgagatcggcgtgcagcaattcaactgccgccgacgccgacacgacagcaccgccggccaggtattcctggtcgaaccgggggagatccacgacggtcgcgcgccgatcgccggcggcttcacctactcgatgctgtacctgcagccggactggctgcggcgcgaactgcgggcgaccttcgacgatgcgcccagcgaccgcgaccccggcttccacgccaacctcaccgaagacccgcgcctgaccctggccatcgcccaggccttccgcgtcctgcatggccgcgagctgcgactgctgcggcagaccgccctggagctggtgctggagcggctgcgcgtgcacctcggctggcgcgaggcgaagccattcgatccgcgcctgccgctggtggcgcagaaagcccgcgactacctgcatgcgcacttctaccaggacatcggcctggacgagctggccagcgcctgcggcaccgaccgcttccgcctgaaccgtgcattcaaggccgcctacggcttgccaccctacgcctacctggtccagttgcgcctggccaaggcgcggcagatgctcgctgtcggcgggcaaccggcggacctcgccagcgccctcggtttcgccgaccagagccatctcggccgctggttccggcgcgcctacgggatgaccccggcggcctaccgccggcagtgcacccagcttccagactgaggcccggcgcgtcgccaggatgaaggctcccccgccacaggagcccgtccatgcaatccctcgtgcccttcctgctgttcgccgtcgtcgcctcgatcacccccggaccgaccaacatcctggtcctgagcaacagccagcgccacggcctggccgccgcctggccgatcgtgctcggcgcctgcgcggcggtggcggcgctgatcctgctgctcgggctcggcctgggcgagttgctgcgacgccatccgctgctccagcaggggctcgcctggctcggcgtcggctggctcagctacctggcctggagcctgttccgcagcgcgggcggcatcgacggcgcggagccgccgcggcgcctcggcgtgctcggcggcgcggcgttgcaactggtcaatcccaaggcctggatgatggccctcgccgcgctggcactgttcgccggggaaggcgccggacaggccgggcggatcggcctgctggcattgctgttcttcctggtttcgctgccgtgcctggccagttgggccttgctcggcgtcggcagcgcgcggctgctgcgctcgccgtcgctgatgaaacgcttcaacgaaggcatggcgctgttgttgctggcatcggcctgggccgccctgctgctctgaggcggtccggtagcttcctgacaaacctgtgggttggtacgccgggcccgggttggctatggtgggacgatccgtagccatggcgcggtcgccgtcagcacgccgcgcaaggaacctccatgttgaaacccgacatcactgccttcttcgacccggccacctccacctacagctacgtggtgcgcgacccgtccagccgcgcctgcgccatcgtcgacccggtgctcgactacgacccggccgccgggcgcaccagccatgccagcgccgaacgcctgatcgcccatgttcgccagcacgacctgcaggtggaatggctgctggagacccacgtgcacgccgaccacctgtcggcggccatcttcctgcagcgcgaactgggcgggtgcctggccatcggcgcgcgaatcacccaggtccaggcgaaattctccggcctgttcaacctcggcgaggcgttcccggtggacggccgccagttcgagcacctgttcgaggacggcgagtcgttccgcatcggcgccctggaatgccgcgcgctgcataccccggggcataccccggcgtgcatgacctacctggtcggcgacagcgccttcgtcggcgataccctgttcatgcccgactacggcaccgcccgctgcgatttccccggcggcgacgcgcgccagctgtatcgctcgatccagcgcctgttcgcgctacccgacgcgacccgcctgttcatgtgccacgactacacggctcccggccgcgacgagcaccgctgcgaaaccagcgtcggcgagcagcgccggcacaacgtgcacgtccgcgaaggcgtcgacgaggaggcgttcgtcgccatgcgccagcagcgcgatgccaccctcggcatgccgaccctgatgctgccggcgatccaggtcaacatgcgcggcggcaacctgccgccggtggaaggcaacggggtgcgttacctgaagatcccgctggatctgttctgatcagctgcggcgacgcagcaggagaatgaagaacagcccgccgatggccgcggtggcgatgccgatgggcaggtcctggggggcgatcagggtgcgcgcggcgacatccatccagaccaggaacagcgcgccgagcagggcgcacaccggcagcagtcggcggtgctcggcacccaccagcaggcgcgcggcgtgcggcagcatgagaccgacgaagccgatggcgccgctcaccgagaccagcacgccggtcagcagcgagcagcagacgaagacccacaggcgtacgcgacgggcgtccaggccgagggtcacggcggtctgttcgccggccatcagcgcgttcagcgcacggcccagcccgagcagtaccagcaggccgccggccacgcacagcgccggcagccagatcaacgaccagcgcgccaggccgaggccgccgagcatccagaacagcacagaggaggcggcgcggtggtcgccgaggaacagcagcaggttggccagcgccaggagcacgaacgacaccgcgacccccgccagcaacagccggtcgctgcccaggcggccgccgcgactggccacgccgagcaccagcagcatgctgccgagggcgccgaggaaggccgccagcggcagggtcagcaggccgatcacctcgccgatgtagagcaccaccaacaccgcgccgagggtcgcgccggaggtggcgccgagcaggtgcggatcggccagcggattgcgcgtgaccgcctgcagggccgctcccaccagcgccaggccggcgccgacgcaggcgccgagcagtacccgtggggcgcggatcagccagacgatgtgctcctggccggcgctccaggcaccgggctccgccgccacgccgaacaggcgctggaggacgatgcggccgaccaggccgctgtccagtcgcgccggaccgaagccgagggcgaccacgcaggacaggccgagcaacatgaccaggctgcccagcaacaggcaataggcgcgagggctgcggaacagggtcatggacgtggcgcccgagggtggaggccggcgaccagggtttctatcgccgcggcgttgccgatgcccggcgtggcctggttatagggcaggacgatgaagcgtcgctcgcggatcgcggtcaggctgcgcagcgccgggttctcttcgaggaagcgctgcttctgcgcggcgctggtctcgccgtagtcgacgatgacgatgacctgcggatcgcgggcgaccacgctttcccagttgacctgggtccaactggccgccacgtcgtcggtcacgctgcggccgccggcggcctcgatcagcgcctgcggcatgcccaggcggccagaggtgaaggggcggtcctcgccgctgtcgtagaggaacacccgcggcgcctcggcgttcgccgggatgccggcgcgggcgcgctcgatgcgtgcctggaggctggcgaccaggcgctcggcgcgcggttcgacgtcgaagatccgccccaggttgcgcaggtcgcggtacagctcgtcgaggctggcgcggcgcggctcgccgatctgcgcgcaggattcgctcagctcgtagaccttcacccccagcggctccaggctggccggagtgaggtcgccgccgacgcgcatgccgtagccccaaccggcgaagaagaagtcggcgtcgacatcgagcagggtttccgccgtggggtagcgcgccaccagctcgggcagcggcttgagcgcggcgatcaatccgggatcggcattcttccaccagccgctgatgccggtatagccgaccatgcgcgtttgcagaccgagggcgaccatcatctcggtgaggttgatgtcgtggctgactgcgcgcgacggcgcgcgctcgaacgtcacttcgcgctcgcagctgcgcacgctgagcgggtagcgctcggccagcgcggcatcggcgcaggcgagcagggcgccgagcagcaggtggtgcaggatcgggtgcttcatgcttgggtaatccaggtcaggcgcgggtggtcggcgagggggtggcggtcgaccagggcgcggacgccgaatacccgccacagcaggtcggcgtcgagcacctcggtcggcgtgccctgggcgacgatgcggccgccgtcgagcacgtagaggcggtcgcagaaggccgccgccagattgaggtcatggaagctcgccagggtgctcaggccgaggctgcgcagcaggcgcagaagctccagctggtagcgcgggtcgaggtggttggtcggttcgtcgaggatcagcaggcgcggctcctgaaccagcgcgcgagccagcagggcgcgctgcttctcgccaccggagaggctggcgaaggggctcgcggcacgcccttcgagaccgacctggagcagcgcctggcggacccgctggcggtcgtccgcgccgtggccgtcgaacaggcccttgtgcggcgtgcggcccatggcgaccacgtcctcgacggcaaggccgaagtcctcggggaactcctgcaacaccaccgcgatacgccgggcggcccagcgcggcggctggcgccagaggtcgtcgccgtcgagcaccacccggccgcgctgcggtcgcgcatagcggaaggcgcagcgcagcaggctggtcttgccgctgccgttggggccgatcaggccgacgaaactgccggccgggacttccagatgcacgccgcgcagcaactcggtggaggcgtcgggcgaccagtgcagggcatcgaggtgaagggacgacatggctactcgcaggtccggtggttcagcagagacgattgccgcggcgccggcttcagaaactgaagtcggcggtgacgttgaacgagcgcggctggcccatgatccattgctggccgttgttgttgtcagccagggcgtactggcggtcgaacaggttgtacagctcaaggccgagggtcaggtccggccgtacccgccagcccaggttggcgtcgaccaccgtgtagccgggcaggctggcctggttggcggcgtcggcgtagcgccggtcgacgtagcgcagcccggcgccgacgcgcagggtctcggcgaaggacttgtccagccagaggttggcggtgcgccgtggcacgttcctggggcgattgccgttgcgcgagtaggtctgcccgtcgatcgtttcgtcgaagtcgtcgtattcggcacgcaccagcgcggcgttcgccgacagccgccagtcctgggccaggttcagttccaggctggcctccaggccgtccgaactctgctggccgacctgctgcgcgtcgtgcggcggcagcgggttggcgctgagcagcttcttcttgacgatatggtaggcggccagggtccattcgccgcgaccgtccgggaacagctgcttgaggccgacctcggtctgcttcgagtgggtcaggtccatctgctgctgggccgcgttgagggtgatcaggttgctcacgccgtcctcgctggtggagtactggccgtacagcgacagttccggggtcagcgcgaagaccagcccggcgcgccagttgccgccctgcaggctgcggtcgctgcgggtgccggcgcgcaggtcgtcgcggtcgatatggttctggtcgcggcgcaccccggtcaccagcgacaggcgctcgttgagctgcaggcggttctcggcgaacagggcgaaggtgcgggtctggctgcgcgagtgcggccggtagggcgagcggctttcgaagtagccgggcgcgggatgccaggggtcgatgtagtcgccgccgacatcggtatagggcgagttgttgctcaggcggaagcggatgcggttgtactcggcgccgaccagggtgcggctgtcgaggccgaacagggcgtgctggaaggcgaaggtctggcggtcgccgatctgctcctgctcgtggctgatgcgcaggtagtccctgcgcaacagctcttcgcgcgggacgtcccattcgtaggtttcggcgttgcgccagtggcggcgggccttgatgtagtacaactggttgctcgcggtgacgctgtcggaaaggctccagtcgctggtcaggcgggtccactggtcgttgtagcgctgcacgtcgttgcgcacgttgtagttcttctcgcgcaggcgcttgtggtacttgccgccgaccagcggggtgccgaagtcgttcatcggctcctggtcgccatagtcgtgggcgagggtgaaggccagatcgttgctggcctgccagcgcagcgccgcgctgatgcccaggttgcgcgagtcgccacggtcgatccagccgtggctctgctgctggttcaggttgagccggtagctgaggctgtcggtcagcgagccgccgctgtccagggccaactggcggttgtcgtaggagccgtagccgaggcgcaggtggttgcggatctcgccggcgaaaggcttcttcggcaccacgttgatcaccgcgccggtggcgccttcgccgtacagcaccgaggccgggccgcggatcacgtcgatgcgctcgaccatccacggatcgctggggaagttcaccgtgcccatgccggtgtacaggcgcgtgccgtcgaacagttgcatcaccgatgcatggccgctgaagccgcgcgccgagaggccggtaccgccatctccgggggtgccgatgaagctgatgccggggctgcgggtaacggcggcctggacgctggggttgttgcgtcggcgaacttcctcgccgctgatgctgctggtgctcgccggggtgtccagggcgctgaggcccaggcgcgaaccggcactgaccggagtggcgaggtcgatgtggtcgagttcggcgggatcctggcgaacgctgaccaactggctgggcagggcgagggcggtttcctcggtttcggcgagggcgggcggtaccagcagcaggctggtggagaggccgagggcgaaaggctcggtgcgcaaacggctgaagcggggcatgggcgttccatctcatgaccgggcaggacggaacgcgcaggaaatcgcaggcgcgacagcgcctcgaacaaccggctcgctcccgcccaccgcgggtgtgccaacagggcgttgcaggccggtctccgggcttgcgagggtcgtgaaatcctcgccttcccatgctggagcacagtggcctgaagaggatttcgctcgcttaccgttgcgggggcagcgccggactgatcaccgaagtgacgcaccggcttcccgtttcacctcctgcgcggcggcaggaggcacctggaacgggccggatgggaacatccgcaccgtttccagtcaagccttgaacgatctggatttaatgaaatgttatactataacaattcgcttgtgcagtctttcttcgcggaccccacgccctggcgcagcttcccgggtcatcacattttcttcacgccggcctgctatgctgccggccttccttggggagtagcctgccgtcacccgttgacggcgcgctggtcaacattcttggcaacctgccatggccagcgcatccaaccggattggtgagaccaacgacattcctgcgccgaagccgggccgcggggtcatgtcgttgactcatgcccggctggagtatccgcgtgaatcccgtttccctgatcttcctcgccttcgccatgtccaccgatgccttcgccgcggccatcggcaagggctccagcctggatcggccgcgcctgtcggaggcgctgcgcaccgggataatcttcggcgtgatcgaggccatcacccctctggtcggctggctgcttggccaggccgccagccagttcgtcgccgactgggatcactggatcgccttcgtcctgctggtgctgctcggcctgcacatgatccacaacggcctgcgcgcggatcatgcgacggaacaggaaaagcccggccagcattcgttctggattctcgcggtgacggcgctggccaccagcatcgacgcgctggcggtgggcgtcggcctggccttcgtcgacgtcaacatcttcctcgccgccggtgccatcggcctggccaccatgaccatggtcaccctcggcaccatgctcggccgggcgctcggcgcagtgaccggcaagcgcgcggagatggtcggcggggtggtgctgatcctggtcggcgcgaccattctctacgagcatctcagcgcggcgtgagcggcgccggagatggaggcgggacaggtcgcggcgagtgggtgggcgttcgcttcaggcgctttcccaatcgcggatcgccgtcagcagcgcctcgccgtcggcgaactcgcggtccgccggcggcagcgccggacgcgccaggaccagcaccggcaggcccatttcccgcgccacctggagcttcggctcggtggcctggctaccgctgttcttgctcaccagcacgtcgcaggcgaggcgctcgaacaacgcccgttcgccatccaggctgaacggcccgcgcgcgccgatcacctcggcgcgcggcgcggccggctggccttgcaggcagcgcacggtccagtgctggtgcggcgggacctggccgagatgctccagcggttcgcggccgagggtgaacagcggacggcggaagggtgcgagggcggcgatcagctcgcgccagtcggctacctcgcgccagtcgtcgccgggcccggcctgccagccgggccggcgcagcgcccagcagggcactccggccagtcgcgcggcgcgcacggcgttctggctgatccgtgcggcgtaagggtgggtggcgtccaccagcaggtcgaagccctgctcgtcgatgaacgccgccagcccttcggcgccgccgtagccgccgacccggacccggcaggccaggtcgccgggcaccttgcccagcccggcgaggctgtagagatgcgccggaccgagccggcgggcgagggccagggcctcaccgatcccgccgagcagcaacaggcgcttcatcggcgctcctcgcaggcctggccgaccaggttgccctggcggtcgatggcgaagacttccagcgccacctcggtgggcacgatgccgcgggcgaagcgcagggcgtgggcgcagaccgcatcgcccagggccacgccttcggcgtgtgcctgggccagcgcctgctggctggtgttggcggcgcgcatgctgtcctgtagcgcggtgctggcaccgagcgcggcggcccagccggccaattgcggcaggtcgatgctggaatggcggctgtgcaggtcgaggtggccgccggcgagcttgctgatcttgccgaagccgccgcacaggctgagcttttccaccggcgccctgcgcaggtgcttgagcaccgcgccggcgaagtcgcccatctcgatcagggcgatctccggcagcgcatagcgccggcgcatggcgtcctcgctggcgttgccggtacaggcggcgatgtgacggacgccgttggcgcgagcgacatcgatgccctgatggatcgaggcgatataggccgagcaggagaacggccggacgatgccgctggtgccgaggatcgacagcccgccgaggatgcccaggcgcgggttcatggtcttcagcgccagctcggcgccgccctccacgccgatggcgacctcgaagccgccggcgtagccccgttcggcggcgagctgggcgaggtggcgttcgatcatctgtcgcggcaccggattgatcgccggctcgccgaccgccagggtcagccccgggcgggtcaccgtaccgaccccggggccggcatggaagcgcacgccaggctcggcgctcaggcgcacccgggcgaacaccagggcgccatgggtgacgtcgggatcgtcgccggcatccttgagggtgccggcttccgcgccgttttcccaggcgcggcagaattccaggcgcatcagcacctgctggcccttgggcaggacgatctgcaccgcgtcgctgatcgtgccgcccagcagcaggcgcgccgccgccaggctggtggcggtggcgcaactgccggtggtgtagccgctgcgcaacggcgcgggctgctcgggggtttcctcacgcatcgcggggaggcttcctggcggcgggtttgcgcaattccagcagggtgatcggcaaggcctggcgccaggtgtcgaaaccgcccagcggtcgcgcgtgggcgacgccgaggcgggtgaggtcgccccccaggcgttgctgccagtcgagcagcacccgttcgctctgcagagtgacggcgttggcgagcaggcggccgccgggccgcaggcgctcccagcaggtctccagcacgccctcggcggtgaccccgccgccgatgaagatggcgtccggctcgggcagttccagcagcgcctccggggcgctgccggcgaccaggtgcagggtcggtacgccgagggcgtcgcggttgtggcggatatgttcctggcgctcgtcgttggcttcgatggcgatcgcccggcaactggggtgcgcgcgcatccattcgatgccgatggagccgcaaccggcgccgacgtcccagagcagctcgccggggcagggcgccaggcgcgccagggtcacggcgcggacgtcgcgcttggtcagctggccgtcgtggcgataggcctcgtcggccaggcccggggtcagcggcaggcgcacggcgccggcgccggcgcggcattccaccgccaccaggttgagatcggcggcgcgcggcagcgaccagtcgccggcgaggccgtcgagacggcgctcgagcggcccgccgaggtgttccagcacgctcaggcgactggcgccgaagccacgggcgctcaacaggcgggcgatggcggccgggctgtcgccgtcgttgctcaggaccagcaggcgccggccgtcgtggacctgtgcctgcagcgccgccagcggacgcgccaccagtgacaggcaggcgacttcctgcagggcccagccgaggcgggcggcggccagcgagagggaggagggcgccggcaggacccgcagttcggtcgccggcagttgccgggcgagactggcgccgacgccgaacagcatcgggtcgccgctggccagcacgcaggtcggctggccgcgccgggccagcaatggttccagggagaacggcgtcggccaggtttcgcgggcggcgccgatgcacggcggcagcagttccagctggcgcgccgcgccgacgatccggctggcttgtagcagggcacgccgggcctgcttgccgaggccgggataaccgtcctcgccgatgcccaccagggtcagccagggcggcgtcgagtctgccgatgacacggttccgatactcctgaaatgcgtctgtgaagggcccgcgacggcttccggacggaatgggttttcccggccccgggctgggcggcataatagcgcgttcgtcggtgcccggccctttcgcgttagcgcggggccaacgagggccgaagagggaacacggagccgcggtcttttcgaagcccgggcctagccgtggctgcccccgcaactgtatgcagcctgtattcgcgccattcgccactggattaccgggaaggcggcgcgaagcggaggttcctcccccgggtggaacgccgggctgcgagccaggagacctgccgccgaaaccagtcgcgagtgccaacatcgggcggggtgtaccgatgccgtggtctgtccctgggggacagcggtgcggtcgccgcgacgccgattcgagtagcgtttttgaacgacgaccagaccccggcgcccctgcccgtaccacgtccgtcgccctgtcccggcctgctgcgtatcgtccaggcgctggacggcggcatctgccgcatcaagctcgacgccggccgcctggacgccgcccaggcacgcgccgtggcggccgcggcgcgggattgcgccagcggcgtgatcgaggcgaccaaccgttccaacctgcaattgcgcggcgtccgtcgcggcgaggaagagcggcttgtccgccgcctgctggacgccggcctcggtccccggcatgggtccctggccggcgccgacgacgtgcgcaacctgatgctcagcccggccgccgggctcgatccgcacctgtcgctggacgtgcgcccgctggccgctcggctgttgctgcggctccaggcggacagccgctaccacgcgctgtcggccaagttcgccatccagctggacggcggcgaagacctggcgatgctcgaacatccccatgacatctggctctcgccgatgcccgcggcgccgaccgcgacgctggtcttcggactcgccggctgcccggcccgcgaccgccccctggcggcgttgccggcggagcggggcgagtccctggtgctggcgttgctcgacctgttcctcgagcgcgcccagccgcaacagacgcggatgcgccacctgttgcaggagctggacggagaacccttgctggaggccttgcaggcgcgcctggatttccctctgcggcgtgacgagcgggtggcggcctggcggcgttcgccggggcgtccgtggagtcatctcggcgtccagccgcaacgccagccgggcctggtgatggtcggcgcggcggcgccgctcggccggctcgacagcgcttgcctggaaggcctggccgagctggtcgaacgccatggcgacggcagcctgcgcctgaccccctggcaaggcgtgctcctgccgaacctggcgcatgccgaggccgaccaggcgctgctcggcctgcgcggactcggcctgctgaccgagcccgatgcgccgttggcgcggctgatcgcctgcagcggttccagcgcctgcgccagaggcctggccgacaccaagggcgacgccttgcgcctggccgaacgcctcggcccgcgcagcgacctgccgcaactgcacctgtgcggctgcgaacggtcctgcgccgccgcccaccgcgcgccgctcaccctgctggcgcgcagcggcgggttctacgacctgtaccggcacgacccatgtcaccccggattcggccagttgctggccagccgcctgactttcgccacggccgccgactacctggcggccctgccttcccagcccacttccggaaaacccgcatgattgactacatccgcgatggccaggcgatctatcgccagtcgttcgctaccatccgcgccgaagcgaacctcgccggcatcccggccgaccttgaaaagctcgcggtcagggtgatccacgcctgcggcatggtcgacgtggtcgacgacctgcgcttctcgcccggcgccggcgccgccggccgcgccgcgctggccgccggcgcggcgatcctctgcgacgcgcggatggtcgccgaaggcgtgacccgctcgcggctgcccgccgccaaccgggtgatctgcaccctcaacgaagcggacgtgccggcgctcgccacggaactcggcaatacccgctcggcggtggccctggagcactggcgcgagcacctggagggcagcgtggtggtgatcggcaacgcgccgaccgcgctgttctacctgctggaaatgctcgacgccggcgcgccgaaaccggcgctgatcctgggcttcccggtcggcttcgtcggcgccgcggaatccaaggagatgctcgccgccgatagccgcggggtgccctacgtgatcgtccgcggtcgccgtggcggcagcgccatggccgccgcggcggtgaacgccctggccacggagcgcgaatgatgagtgtcgtgaagggccgcctgctgggcctgggcgtcgggcccggcgatcccgaactgatcaccctcaaggccctgcgcctgctgcgcgcggcgccggtggtcggctatttcgtggccaagggcaagaagggcaacgccttcggcatcatcgaggcgcacctggaccaggcccaggtgcgcctgccgctggtctatccggtgaccaccgagaagctggaaccgccgctgtgctacgagaccatcatcagcgatttctacgacaccgccgccgaacagctggccgcgcacctggacgccggccgcgacgtggcggtgatctgcgagggcgacccgttcttctacggttcctacatgtacctgcacgaccgcctggcgatgcgctacgaaagcgaagtggtgcctggcgtctgctcgatgctcggcggcgcggcggtgctcggtgcgccgctggtgtaccgcaaccagagcctctcggtgctctccggagtgctgcccgaggaggagttgcgccggcgcctggcggatgccgacgcggcggtggtgatgaagctcggccgcaatttcgacaaggtccgccgcgtgctggtcgagcttggcctcgagcgccgcgcgctgtacgtcgagcgggcgaccatggccaaccagcggatcgtgccgttggaacgggtggagccgatggcctcgccgtacttctcgctgatcgtcgtccccggcgacaagtggcagggaggggccggcggtgagtgacgcccagcaggttccggccatcgtcatcctcggccagggcgcgctggataccgcgcggcgggtccaggcgcgctatcccggggcgctggtccacgggctcgccgggcgggtcgaggccgaccgttcctatacggacttcggcgacaccctgcgcgaactgtattgcgccgaccgcccgatcgtcgccctgtgcgccgccggcatcgtcattcgcagcctggcgccgttgttgcaacgcaagggagcggagccgccggtgctggccctggccgaggacggtagcgcggtggtgccgctgctcggcgggctggccggggtcaaccggctggcgcgggaaatcggcgaggtgctggccgtggcgccggcgatcaccaccagcggcgagctgcgcttcggcacctgcgtgctcaacccgcccgccggttatgtcctggccgacctggagcagggcaagcgcttcgttgccgatttgctcggtggccagccggtgcgcgtcgagggtgccgccgactggctcgacgcggcccgtttgccgcgcgacccggaggcagcgctggcgattcacgtgacgccctcggcgcgtgcgccgcgggccgaggaactgctgatccatccgcgctgcgtgctggcggcgctcgaacctgccgacgcggcggcggacgcggtgcgccaggcgctggtcgatgccggcctggccgcggcggcgctcggcggcttgctggccgacagcgcgcggatggccgatccgcgcctgcaggccgccgccgatgcgctcggcgtaccgctgcgcttcctgccgcaggccgatcccgctgcgcgcctgcgccaggccttgcccgccgccgagcaggtcggcgaccggctggcggtggccgccgcgcccttggcgatggaccgcatcggccagcgtcgcggccgactcacagtgatcggcctggggcccggctgcgccgagctgatggtgcctgcggcgcggcgggcactggacgaggccgaggacatcctcggctaccagacctacgtcgacatggccggacccttccgcgccggacaggtgctgcatggcagcgacaaccgcgaggaattgcagcgcgcccggcatgccttcgaactggcggcgacgggcagggcggtggtgctggtatcgtccggcgaccccggcgtgttcgccatggccgccgcggtgctggaagccctgcatggcgctggcgagccggcctgggacgcggtcgagctgcggatcttccctggcgtctcggcggccctggccaccgcggccagggcgggggcgcctctgggccacgatttctgcctgctgtcgctgtccgacaacctcaagccctgggaggtgatcgagcggcgcctggacctggccggcgccgccgacctggcgatggctttctacaatccgatctcgcgggcgcggccctggcaactgggacgggcgctggagatcgtcgcccgccatcgttcgccgcagaccctggtggtgctcggtcgcgacatcgggcggcccggtgagcgcctgctgcgcaccaccctgggcgagctgcgtgcggagcaggtggacatgcgcaccctggtgatcatcggctcgtccactacccgcagcttcccgcgcgccgacggcgaagcctgggtctacacgccgcgctggtacccatcggaatagcggggcgggagcgcgcgcggaaatgtggcagactgctgcgcgcatccctgtaccgcggagcctgaatccatgtcctttcgctgttccccgtgccgcctggccggcatcctgctggcggcgctgttcgttccggggctggccgcggcggccggctcctgcgagcgcctggtggccaccggcaacccggagtacccaccctacctgtggcgcgacccgcaggatccgaagcgcctgatcggagccaatgccgacctgttgcagcgcctgggcaaggagctcggcgtgcgcatcgacgtgctctacagcggctcctgggaggaggcccaggaagaggtgaccagcggtcgcgccgacctgctcgccggggcctacctgaccctggcacggctcggcagcatggactatgtacatccgccgttcctgatgaccagcggggtggtctgggtgaacaaggacgccgcgttcccgttcatcggccgcgacgacctgatcgggcacaagggcagcgtgctggccggcagcagcctgggcgaggagttcgaccgcttcgccaaggccagtctcgacctgaagccggtgccgagcctgacccagggcttgcaggacctgatgctcaagcgcagcgagttcctcctctaccaggcgttgcccgggcaggcccaggtcgaggcgctgggcatggccgacgacctggaggcgctggaaccggtgctgagcagcgaggggctgtacctgacgctgtcgcacaactccgcctgcaacgatccgtggctgcgcggacaactggcgaaaaagatgacagaattgtcggctgccggcgttcccgtaacgctcttgcaggacaatctcgaacgctggacagcccagcaattgccggcttccggcgccagttcgactacgcaggaaagtgacttgtgagcattcgatggatgatggccgcaggcctcgccgcgctgaccctgagcggttgtgcgagcaacgacccggctccgctggagcagatgcgcctgaccgaacaggcgctggagcaggccaaggcggtgggtgccaccgacgacgtggccgagctgaaactggcccaggacaagtacgccgcggcgcagatcgcgatgaccgcggagtcctacaagaaggcgcgcctgttggccgagcaggccgagctggacgcacgcctcgccgagtccaaggtgctgacgcagaagagcaaggaccagctcggcgagctggacaagagcctgaaacgtctgcgcaagcaactgggggagaccgactgatgccgggcaaagcgactctcttcgccaccctgctggcctgcgccgcgctggctggctgcgccgaccacaagctcagcgaacagtcgctggccaaggcgcagagcgagttcgaccaggtcaaggaagattccgacgtgctccgcgcggcgcccaaggatgtgatccgcgccggcgaatcgctggcccgcgccgaacgcctgtccagctactggggcagcagcagcgacgtgatccagtatgcctacctgagccagcgctacagcgagatcgctcgccagcacgccttgctcaacctcaaccaggagcgcctgacccgcctgcaactggagcgcgagcgcctgcaactggccctgcgcgaagccaagctgctcagcgtgcaggagcagggccagcgcctgagcgaggagatcgccagtctcagcaccgaggaaaccgagcgtggcctggtgctcacccttggcgacgtgctgttcgacttcaaccgcgccgaactcaagccggcggccaaccgcaccgcgctgaagctggtgcagttcctccagctcaatccgcggcgggtgatccgcatcgaaggctataccgacagcgtcggcgacaggcaggccaacctcgacctgtcgcgcgagcgcgcccaggcggtggccgacgtgctcgccgatctcggcgtggatcccgcgcgcatgcaggtggtcggctacggcgaagccttcccggtcaccgacaacgcctccaaccgggggcgggcgcagaaccgccgggtggagatcgtcttctccaacgacaagggccagctcagcgcgccgcgctgagtcccgcgctgccgcagggagccccggtaccccaaagggtccggggcttttttcgcctggcgaaccgggtggcgccggatttctctgtcagaccttgcgcaagagcgggctatcatcgggatcgaactagttcgagcagcaatccgtgcagcataagcaccttgtatttcgttataacgagtagagaggcgcaatgagttcgaacgaaaccctgccggggctggtgatcgccgattccttcccggtcatgcagtgggcgctgcagcgctacctcagcgaggagtgcggacgccaggtgctggcggtggtcggcgatagcgacagcctggtggagcgcctggccgacctgccgccggaaagcatcctgatcaccgagctgggcttgcctggccagcgcagccgcgacggtatccacctggtggaatggctgacccggcactgcccgcaaatgaaggtgatggtctactcggtgttcagcgcgccgttgctggccaaggcggtcctgcgcagcggcgcctcggcctacatcagcaagcgcagcccgctggagacgttgaaggcggcgctggagtgcatggcgctcggacagaccttcctcgaccccggcctgcacccgcagcggcataccggcaagccgctgagccccaccgaggtggacatcctccggcgcctggcgcgtggcgacacggtcagcgagatcgcccagcggaccatgcgcagcgtgtcgaccatcagcacccacaagaagaacgcgatggtcaagataggcctcaacagtgacgccgaactgatcgccctgggcgtgatgaactggctccacgaactcgcctgaccgggttcgaaacatctcgaccgccagttgcggaacaatcctcgccagcccccgggagccatcccgccgcagccgaggaatccgcatgatccgccagccccgctttgcccgtttcgtcctgccgttgttgctgagcctgtgccagccgtccttcgccgccgaactccgcgcggttgccgaagcacgccgccaggaactcctgctggaggactcgccggtggcgtgcggcgaggtgggctgcacggcgcgggaaagcctcagcctggtggcgttgcaggtgcaggcccgggttctggtcacccgcctcggccgcgatgatttttccccggccgcccgccagcccgccgccgtcccggactaccgcctgttcggcgatctcggcctggcgccaagccccttcgcctggcaagcgttgaccggcgagagcgcggcggcggacgcgttgcgtttctgactttccctatggccgctccccaggcggctcttggcggactgtttcccgcccgcacccggccggtggcgaccgaccgggttttcttttcctcgcgaacgcgccgtctctgcgaccgacccgtacagttttgcgactgtatgcctggttgtcggtcgaactgttctggagcagtttcacgaattgagctactgtttcggttcaatcgccgaggaaaacccgccatgaccaatctgctgctttaccaacgcatcgcccagcagttggccgaggacattcgccgtggcgtctaccagccgggcgagcgggtaccgtcggtgcgcaagctcagtacccagttgaacgtcagccacgccaccgtgctgcaggcctacgccaccctcgaggaccagggactgatccgcgcccgtccgcaatccggcttctacgtccaccgcaccccggcgctgaccgcgccgaccccggatatcgcgcgggtcgagcgtcccggcctggtcacccgcagcagcatcatcaaccaggtgctcgccgagtcccgccgcgaaggggtattcccgctcggcgcggcggtgccgcacgtggactacctgccggtgcgcgccttgcaccagcaactggccaaggtcacccgcttccagagcccacgggcgttcagctacatgttcagccccggtttcgagccgctgcggcggcaggtggcgatccgcatgcgcgacgccggcgtggtggtcgacccgtcgcaggtgaccatcacccacggctgcgtggatgcgatccacatggccctgcgggtgctgacccgtcccggcgacctgatcgccaccgagtcgccgagctactacggcctgctgcaactggccgacgtgctgggcctgaaggtcatcgagatccccagcgacccgcgcaccgggatcagccttgaagcgctgcaactggcggccaaccagtggtcgatcaaggccttggtgctgaccgcgcggctgagcaatcccttcggcgggacgattcccgaggatcgccagaagcaactgctgaaactgaccgccgaacacaacatcggggtggtcgaggacgacatctacggcgaactgatgttcgaccagggccaggcgcgctcgctcaagtcccacgaccgcgacggccgggtgatctactgctcgagtttctccaagaccatctcgcccggcgtacgcatcggctggatcatcgccgagcgctaccaggaggagatccgtcgcttgcagaccttcaccacccattcggcctgcaccgtgacccagatgggcgtcgccgcctacctggagaacggcggctacgaccgccacctgcgctacatccgccaggagtaccggaagaacatgaccgcctaccagttggcggtgcagcagtacttcccggaaggtacgcagatgacccggcccaagggcggcttcatcctctgggtcagcctgccggccaaggtcaacaccaaggaactccacgtgcgggccctggagcagggcatcagcatcgccccggggctgatcttcagcaacaccgagcagttcaacaactgcctgcggctgacctgcgggattccctggaaccgcgaggcggagcgggcgatcatgaccctcggcatgcttgccgggcagctttgccaggaaggccttatcgccgcctgagcgcgaggcgctcccctggctgaggggcgccccgcgacagtccgcgaagaattttcccggggattaacccgaacccaccgacagcttcgtctcagcgggtatctccgctgcacgacgaggtcgtctcgatgtttttcccggcttccatccggaccggcactttcgccgaactgtccgacgctggaaaatgtctaccgatagccgctccggccgcgcttctggcgacggcccgggcgtttcgtggcgacgccgatgcgtgccgcgaaggatgtggccgatgagcctgctctcggtcgcctttgacacaggacaggagtcgaccagcggcatgcatgcctccaccagcgccacgacggccgccggcagcgacgaaacgctgctggcgcgttaccgcaagggcgacagcgcggccttcgaggtgctctaccagcgccatcggcaaggtctctaccgttttctctgcggcctggccggacagaccgaactggccgacgagatctaccaggaaacctggctcagcctgatccgcagcgagagccagccgcagggccgggcgagcttccgcacctggctctaccagatcgcccgcaaccgcttgatcgatcattggcgcaagcatggccagcgccagccgttgcaggacagctacgacgaacagttgcacgcgcaacccgaccagggcgccggccccgagcagcagctcagcctgagccgcgacggcgagcgcttgcagagcgcgctggagaccctgcccgaggaacagcgcgaggtattcctgatgcgcgcccacggcgaactggaactggccgagatcgccacgctcacccagtcgccgctggagacggtgaagagccgtttccgctacgcggtgcagaagctgcgccggctgctggccgaggaggtggcggtatgaacccacagaagcattccgcgagcgtcgccgaagagcagatgctggcgcatttccgcgcccacgcgccgcagcagccggcgccggcgctggaccaggcgatcctcgccgccgcgcgacgccaggcggcgcatgtcgaacccgcccggtcctggtggcggcgctggctggaagcctcccgcaggccgcgttggcaggcggctttcgccagcctgctgggcgtggcgctggtgctggggctggtcagccacaacgtgctggacgacgccgagcgccaggcccgccccgaagtggcgttcagcgatgtgcccctgcgcgacggagtcgccggggccgctgcggcgaagcgggccatgcgcgcgccggcggcgccggctccgctgtccagcgagatgtcggagcccccggccttgctggccagctacgcatcgtccggggaggcgccgcaactgatggccgaggccgcgccggcggctccggctgccctggccgaccgaccgccggcccaggccgcgcagcaggcgaaggtccaggcggcgctggccggcgacttcgtcgcccaggccaggggcaaggcggttgcggtgaagccggaggtgctcgacgaggcgctcggggcggtccttgccctgcgtgagcagggcaagacggagcaggccgcgacccagttggccgagctgcagaaacgtttccccggagagaacctggtggaacgactggaacgcctcgcgacgatagccgcgagcgccaagaaacggccgtgacgaccatggcccgcgacgcggcggcggcgtcgcgggctgacatcaagcggttatccgcgcatgacaggttagacatggggcgaacaacagagagagtgccaggatgacgatagtgaccccttgccttggttgcagtctgccgtcagcattgccgcaattggccatacctgcgtgactatgaaacgtctttgccgaatttgcgtcgttgttcttttcggttgcttcctggcggcctgcgatgacggctccaaggcaccggaaaagaaagccccggaagcaccgccgcaggagcagcgcgcccctgccaagccagtgaagcctgcacgagcggagccagcgcctgccgtgcctgccgcgccgaaaacagcttcgaagaaggtcgcgccagccgcggagcaggttgccgaacccaagccgccggccaagccgaagcctgcggctgcgccgccgaagccggccagcaggccggtcgccaaggacaagccggcgccggcgaagcgcgcttccaccgctcgtctcgaccccgaggtacgcaagccgctgccgagcgccaagctggacctgcgcctgccgaaggaactggtgcagaagatggcgccgcccggcacggaagagacccataagcccaagccgctgttgccgccgatgttcgaggaaaaggacgacagcgacttccgcctcaacggccagttgctctatcgcgaccgcgaactgggcgtgtcgcggcccctggaaggggccgagttgcagttcgagttccgccagtaggccgccacggtgctcagaagcggtagcgctgctcctgcaacgcctggtacagctccgcgtccagcggctggtagccggcgctgccgggcaacctgacgaagagtttgtcgctgacccgcgcgggatcgtaggcgtcgcgcttgaggtcggtcttcttgtacttgaaggtgccggtggtctcgacttcgcgcagcaggcgcaggaacaccggtgtggcataggccggcaactcgcggtcgaggtgcgcggcgagagcgtcgcggtccagttcgacgccatcggccaggcgcagcgcggccatcccgcagcggccgttggtgccgggaatctccacgccgtagaccaccgcatcctcgaccccgtcgaaggcgccgagggcgttttccacctcggtggtggaaacgttctcgcccttccagcggaaggtgtcgccgagacggtcgacgaactgggtgtgcttgaaaccgatgtcgcgcatcaggtcgccggtgttgaaccaggcgtcgcccttcttgaacacgtcgcggaggatcaccgcttcgctcttggccggatcggtgtagccgtcgaacggccacttcgcactgatctcgctgatcagcaggccgacctcgcccttgccgaccttctccatgaagcccttggcgtcgcgcaccggatggtcgttctccaggtcgtagcggacgatggcgtaggtggctggggagaagcccaccgtattgtcgaaattgaatacattggtgaagccgatgttgccttcgctggaagcgtagaactcggtgatccgctggatctcgaagcgttgcttgaactcggcccagatcgacgggcgcaggccgttgccgatcatgcaggtcaggctattgccgcgttcctcggcgcacggtggctggttcagcaggtagcggcagagctcgccgatgtagccgaagcaggtcgcccggtagtgttgcacgtccttccagaaaccgctggcggagaacttgcggcgcagggccatggccgcgccgccggcgagcgccgcgctccagcagacggtcacggcgttgttgtggtagcagggcagggtcaggtagagcacgtcgtcgcggcccaggcccagaccggaatggccgaagccgccgtaggccttgatccacttgccgtggctcatgatcgaggctttcggcaggccggtggtgccggaggtgtagatgtagaagcaggagtccttgagccgcaccctgccggtgtcctcgaggttctccgaggtctgtccctgggccaggcgcatcaggttgcgccagcccatcggcggcgagccgggatcgccgagggtgtcgccgtcgtcgacccagtagcaatggccggcgttgccgagcacctcctggcggacttcctcgaacacctcgcgcaactcttcgccgaccacgaagtggccgggcttcactaggttcaggctgtgcaccaggaccttgccgcgctgggtggtgttgaccagtgcgccgatggcgccgagtttggccagggcggcgaggatcgccagcagctcgacgcggttttccagcatcaccgcgaccacgctgccgtggcctacgccctcggccttgaaggcgcgcgccaggcgattggcccagccgttgaacagggcgtagctgatccgccgctggccgtcgagcaccgccgggttgtccgggtacaggcgtgccgcgcgctccagcgcccagcccagggacaggctcttctcgcggttacggatcgcggtgtagtacaggccgcgcagcatgcgcggcacgcggccgaaggtggcaggcaggcgggcaacgaaacggttgaaagtgatcaggtcggcgtgggtcatggctctcgcgcttgtcgttgttgtgcggggcgtaggacgctcccgcgactctagaccgcagccgccgcctcggctatgaccgttgcgcggtcgccccggggcacttcggcaaatagcccggaagcccgccgcagagcgccgcgcgcctttcgtcggagacctcagtcgaggaacaggtcgggcaccagcgcgccaccctccgggtcgtagcggtactgctcgaaatcgctctggccgcgctcgcgcagcaattcctcgtcgaccagcaggcgcccgctgaggctgcgcccctcgctggtgagaatggcgtgcgcggcgtcggccatgatcgccggggtgcgcgcgcggcggaaggcgtcacggctgcccagctcgaactcgatggcggcggtggcgatcatggtcttcggccacagcgcgttgacgctgatggcgtatttcccgaactcctcgtgcatccccagggtaagcatgctcatgccgtacttggtgaccgtgtaggggctgtgctgggcgaaccacctgccggccaggttgatcggcggcgacaggctgaggatgtggccgttggcgctcctgcgcaggtagggcagggcggcctggctgcagaccagcaccgcgcgggtgttgatctggtacatcaggtcgaagcgcttgggctccagcttctccaccccgaccaggcggatcgccccggcgttgttgaccagcgcgtcgatcccgccgaagcgttcggcggcgcgggccatggccgccgccacggcctgctcgtcgcgcacgtcgagttgcagcggcagggcctggccgccggcggcctcgacctcggcggcgacgctgaagatggtgccttccagcttcggatgcggctcggcgctcttcgccgcgatcaccaagttggcgccatcgcgcgcggcgcgcagggctatctcccggccgatgccgcggctggcgccggtgatgaacagggtcttgccgtgcagtgacatgggcgtctccgttttcttgtcgttgtcgttgcggatgagcggcggggtgtctcaggcgtcggcttccacctcgaccagcacctgccggttgcgcacctgctcgccacggccgacctggacgcggcggaccacgccgtcgactccggccttcagcgggtgttccatcttcattgcctccagcaccagcagcagttggcccttgccgacccgttcgccctcgccgaccagcacctcgacgatggcgccgtccatcggcgccttgagcgtgccggaactggcgccgacctgggcgctggcgccggcgtgggtgacgtcgagcagttcgaggttgccgccgtggccgtatagccagaggcgcccgccgtccaggtggtaggcgtggcggcggcgaatgccgtcgagttcggcgctggcccagcgtccgtcgcagtcgagcaggcgcacggcgatctcgcgtcgctccaggcgcgccagcagtcgcggccggcgaccgctttcgaggacgtccaggccgatctccaggcgctgttcggcgtgcttcaggacgatcttccacggtgccccggcggcgctgcgccagccggccaggccgggctggtgcgcactggcctcggcgccggcctggtagagcagggcggcggccagggccagttcctcggcgcccggctggcgcggttgcaggctggggtcttcggcgaagcgttcgccgatgaaggcggtggtcgcctcgccggcggcgaagtccggatgcgccaggaggttggcgaggaaccgctggttgccgtcgacccccagcagcacgcagcgctccagcgcgcggatcagcttgcgccgggcttcgtcgcgggtcgccccgtaggcgatcagcttggccagcatcgggtcgtagaagggcgtcaccgcctgcccctcgaccaggccatggtcgatgcgtacgccgggcagcagttccgggtcccagcgcagcaccgtgccggtctgcggcaggaagccgcgaccggcgtcctcggcgtagaggcggacctcgatggcatgcccgcgcagttccacctgttcctgccgcagcggcagcggatggccctcggcgacgcggatctgccaggccaccaggtcctggccggtgaccagttcggtgaccgggtgttcgacctgcaggcgggtattcatctccaggaagtagaagcggccatcctcgccgagaagaaactcgacggtgccggcgcccacgtagttgaccgaagccgcggccttcaccgccgcctcgcccatggcgcgacgcaggtcggcatcgagcaccgggcagggggcttcctcgatgaccttctggtggcggcgctgcaccgagcagtcgcgttcgccgaggtagagcaggttgccgtggcggtcgccgaacacctggatctccacatggcgcgggcgcagcacggccttctccaggatcagttcggcgctgccgaaggcgcccagcgcttccgagcgtgcggtgcgcaactgctccagcagttggtcgggttcctccaccaggcgcatgccgcggccgccgccgccggcgctggccttgatcatcagtgggtagccgatgcgttcggcctcgcgccgcagggtcgcgtcgtcctgttcggcgccttcgtagccggggatgcacggcaccccggcggcgagcatggcgatcttcgacaggcgcttgctgcccatcaggtggatggcttccgcatccgggccgatgaagacgatcccggcggcttcgcaggcacgggcgaattcggcgttctcggagaggaagccgtagccggggtggatcgcctcggcgccgctgcgacgggcggcgtcgaggatcgcctcgagattcaggtaggactgcgccaccgctgccgggccgatgcacacggcctcgtcggccagttgcacatggcgggcgtcggcgtccgcctcgctgcacacggcaacgctgcggtagcccagttcatgggcggtgcgcagcacccggcaggcgatttcaccgcggttggcgacgaggatcttgttgaagctgggcatgtcgttcggctcctggaggctgttgccctgtttcgcggtcgtggctcactgggcccagaccggcttgcgtttctgtacgaaggccagggtgccttcactgccttcggcgccgcccaccgcttcggcgaactgtcgcgccgcatcgtccagcagggcgccgagttcgccgctttcgctggccagcagcagggccttggtggcggcgttggcgttcggcgcgcagcggcgcagttgctcgagggtttcctccaggcgctgttcgagggcatcggcgtcggcctcgcagaaatgcaccaggcccaggcgcagcgcctcgcggccgtcgaagcgggcggcggtgagggccaggcggcgggcctgggtcaggccgatgcggcggaccacgaaaggcgcgatctgcgccgggagaatgccgaggctggtttccggcaggccgaactgcgcatcggcggcggcgatcgctacgtccgacacgcaggccaggccgaaaccgccgccgagcaccgcgccttccaccagcgccaccagcagttgcggggcggcctgggcttcctccagcaggctgccgaaggcgcggttcagcgtgcggtaggcttccgccccggcggcgcgggcaccggccatgtccttgatgtcgccgccggcgcagaagtgcccgccggcgccgcgcagcaccagcgcccgcacgctacggtcgtcgcgcacggcggcgagcaccgcgcgcagttcgccgaccatcgccaggctcatggcgttgcggctttgcgggcggttcagggtgatccgcaggacgccctcgacgggttccagcagcagggtctcgcaatgcggcaggctcatgccggtttcctcctggaacgtcagcctttcttcttgcccggcaggatgcccatcagcttgcagatgatgccgagcatgatctcgtcggcaccgccgccgatggataccaggcgggtgtcgcggtaggcgcgggagaccgggttgtcccacatgaagcccatgccgccccagtactgcaggcaggcgtcgctgacctcgcggccgaggcggccggccttgagcttggccatggaagccaggcgcgtcacgtccctgcctttcacgtacagctcggtggcctggtagaccagggcgcgcagcgcctcgacctcggtcatcatctcggccatgcgaaagtggatgacctggttgtcgatcagcggctggccgaaggtcctgcgctccttgcaatactcgatggtgacgtcgatgcagtgctccaggcccttgatcatgttggccgcgccgaacagccgttcttcctggaactgcagcatctgcatcatgaagccggcgccctccgcgccgatgcggttgcgctgcggtacgcggacgttatcgaagaacacctgggcggtctccgaactgcgcatgccgagcttgtccaggtgcggactgagggtaatgcccggggtcttcatcgggaccacgatcagcgacttgttgacgtgcggcttgtcgtcggaggtattggcgagcaggcacatgaagtcggccgacggcgagttggtgatccacatcttgctgccgttgatcacatagtcgtcgccgtccttgcgcgcggtggtcttcaggccggcgacgtcggagccggcgccgacctcggagacgccgatgcagccgaccatctcgccggcgatggccgggcggaggaactcctcgcgcaactcgtcggaaccgaagcgggccagggccggggtgcacatgtcggtctgcacaccgatggccatcgggatgccgccgcaggtgatgctgccgaattcctcggcggcgacgatcgagtagctgtagtccaggcccatgccgccgaacttctccggcttggagatgcccagcaggccgagttcgccggccttgcggaagatctcgtggatcgggaagcggccgtccttttcccactggtcgacgttggggttgatttcccgctcgacgaagctgcgaacggtgcggcggagttcctcgtgttcctgggtgaagatcatgggttgtctttcctcctgggcatcattgttttccggcgggatccgcttgctctctcccaaccctcttccttcagggagagcggggagaggggctgtcgccggctcgcctgtttcagtcagaacctcgcgaccccgaagctgttgcccttcagcggccgcgcctcggcttccgcgcagatatccagcaggtagccgagcagcctgcggctgtcgcgcgggtcgaccaggccgtcgtcccacaggctggcggtgccgtagagcgcggtggactggctgtcgagcttctgcgcggtgacggtttccagcatctcgagcatcttcggatcggcttccttgccttccttggcgtgtttctcctcggtgacgatgcgcagcaccttgccggcctgggcaccgcccatcaccgcggtgcgactgttcggccaggcgaagatgaagcgcgggtcgaggccgcgtccgcacatcgcgtagttgccggcgccgtaggagccgccgaccaccagggtcagcttgggcacgcgggcgttggccaccgcctggatcatcttcgagccgtgcttgatcacgccctggcgctccgactcggtgccgaccatgaagccggtggtgttgtgcaggaacagcagcggcgtgttgctctgttcgcagagctggatgaactgcgccgccttggccgcgccctgcggggtgatcggtccgttgttgccgatcaggccgcaggcgtggccctcgatgcgcaggtggccgcagacggtctggccgtcgaactcgttcttgaagtcgaggaactcggagccgtcggcgatgcgcgcgacgatctcgcggacgtcgtagggcttcttcgggtcggccggaaccaccccgagcagctcctccaccgggtacagcggttcacgccaggaacgcgccgggcgcgccggcagttgtgcgttccacggcaacatgccgacgatctcgcgggccaggcgcacgccgtcggcgtcgttttccgccaggtattccgcggtgccggcgacctgcgcgtgcagttcggctccgccgagctcctcgtcgctggcgatctcgccggtggcggccttgagcaacggcggcccggcgaggaacatcttggccttgccgcgcaccaccaccacgtagtccgacagccccggctggtaggcaccgccggcggtgctggaaccatgcaccacggtgacctggggaatgcccatggcggagatccgcgcctggttggcgaagccgcgcgcaccttcgacgaagatctccgccgcgtagttgaggttggcgccaccgctttcggtgagggtcaccaccggcagcttgttctccatggcgatctgctgcaggcgcagggtcttcttcagcccggtcggggagatggtgccgcccttgatcgcgctgttgctggcactgaccaggcagcgcaccccggcgatgtagccgatcccggcgatgatcccgccgccggcctgggtgccgtccttgtcgtcgtgcagcttgtagccggccagcgaggacagttcgaggaacggcgcgcccgggtcgagcagcagcgccaggcgttcgcgcggcagcagctggccgcgtttctcgaacttcggcctggcctcggcggctttgtccaggaccttctgctccaactcgcggaagccggccacggcggcgagcatggcctcgcggttgcgggcgaagtcctcgccgttgacgtcgagttccgactggatcgcgggcatgtcagtcctcctggtccttcagtacgtcgggcaggtaggcgcggtggaagccgttgtacgcgcggctctgtcccggcttgcccttgaatagcgggaaggcgcggctgccctggctggcggcgccgtcgatgcggatcgtgttgccgctgacgaaggcggcgccgggggagagcaggaagacgatggcggcggcgacttccgactcgctgccgatgcgcttgagcggcacgtgctcgcgcagggtcgggatcaccgccttgaacgcgccttcgtaggtatccatgccgctggacgcgatccagcccggcgccaccgcgttgacccgcacgccggcatggccccactcgacggcggcggtcctggtgaaattctccatgcccgagcgtgcggcgccggagtgacccatgccgggcatgccgccccacatgtcggcgagcatgttgacgatgctgccgccggtcttgctcatcgactggttgaacacttcgcgggcgaccaggaagccgccgaccaggttggtgcggagcacggtctcgaagcccttctggctgatcgaggcgaggggcgagggatactggccgccggcgttgttgacgaggtgatggatggtcccgcgttcggccaggatattcgccaccagcgtcttcaccgcttcctcctcgcggatgtcgcaggcgtgccagctgacgctgccgccgtcctcgacgatctcgccggcggtcttctccagcttttccgccttgcgtccgaccagcaccacgtgggcgccgagagccgccagctcgtgggcggtgcagcggccgatgccgctgccgccgccggtgacgatgatggtctggccgtcgaacaggccaggtcggaagatcgagtcgtagctcattgttctggtgactccgatgaatcccgtagaggggcagcggaacgccgcattcgccgttcctggttgtggttatctgccttgcgtttccagcgcgtcggcgagcgcctgcggcaccgccaccggaaactccagcaactgctgggcaaaggccttgccctgcgggtcgatgcgcaggctggcgacgccgccgccgccgagggcgttctccagcaggaagttcaggctgtggctgcccggcaggtaccagcggccgacccggccggtctgcgggtcgagcacatgctgcatccagtccaccaccgcgccttcctccagcgcctcggcgatccacggcaggtactccggacgccgtgccatgaccccgatgttgctgtggttgcccttgtcgccggagcgcgccaccgctagcttcaccagcggcacgctggcgctggcgggctgctccgggcgtggcggctggtgcgcctcggccaatcgtgccggatcgaaggcttcgaggacgggcagttccagcggatggcgctggccgtcgatctccacgctcaacgcgcattgcgccttgtcgatcaggaaagagaacaggcggatcaccggatacaccgtcggccggccgccgacgatgccggtcaggccgggcgccatcccggtggcggcctgggcgatctcgcgggagaacagcgccagggcttccttgcgcggatgccggacggccagcttgaccaccacttcgcggctgtcctgccgtcgcccatgggggccataggtggcttcgctgccgagcagttcgacgttgacctcgcggtagggctcccagccgcgctcggcgaagatttcctcggtcctggcgatgatcgcctggctgacccgctcggccttcttcagcgcatcgatgccggcgatcaggcaactggcggtgcagcggaaaccgtccggataggtggcgctgaccttgtaccggtcggtgggcggcaggccgcgcgcgccttccaccgcgacccggtcgggtccgacctggcgcaggcgcacctcggtgaagtcgcagaccacgtcgggcagcaggtaggcgcgtgggtcgccgatctcgtagagcatctgttcgccgacgctcagttcgctgaccaggccaccggtgccgggcgccttggtcaccacgaagcgcccgtcggcctcgacctcgacgatggggaaaccgatgtgctcatagtccggcacctgctcccagtcggtgaaattgccgccggtgcattgcgcgccgcattcgacgatgtgcccggcgagggctgcctgggccagtcggtcgtagtcgtcccaggcccagccgaactcgtgcaccagggcggcgctgaccaccgcgctgtcgaccacccggccggtgatcacgatatccgcgcccaggcgcagggcctcgacgatgcccggcgcgccgaggtaggcgttgagcgagacgcacatcggcgggaaaggcgcgtcgctgaacatctcgcggatgccggccttggccagttcggcctggcgcgcttgcaggttgtcgccatggagcacggcgatcttcagctgcaccccggccttctcgcaggccgcggcgagggcggcggcacaggcctgcggattgatcccgccagcgttgctgatgacgcggatcttcttctcggcgatctcgcccagcagtggtgcgaggacctcgacgaagtcggtggcgtagccggcgtccggctgtttcaggcgggcgccggccatgatcgacatggtgatctcggccaggtagtcgaacaccaggtaatccagcggcgcgccgcgcaccaactgggcggccgcggtgcaggtgtcgccccagaaggccgaggcgcagccgatgcgtacggtcttttgcattgttcttgacccgtgacggcggaagtgtggggcgacattaccaagcaagcgcttggttgagaagagggcggaaacaaatcccttcgcggctgttacccaagcgcttgctcggtcgtcttcgcaggcatacatttcatgaatgccgacaagcacttgcggggcaatcccgaggccggtcggcaaatacggagcggccgggcgcgcggatgagcggcaccgagccgccgacgatccggaaaaggggtactcagcgttggacgatcagaaagcccgggaagtgatgctggagctggtggctaccggacagctcaccgatccggaaagcgcccgcggcaagctgctgcagaccgccgcccacctgttccgcagcaaaggctacgaacgcaccacggtgcgcgacctggccagcgcggtgggcatccagtcgggcagcatcttccatcacttcaagagcaaggacgagatcctgcgctcggtgatggaagagaccatcctctacaacaccgcgctgatgcgcgccgccctggccgacgccgaggacctgcgcgagcgggtgctgggactgatccgctgcgagctgcaatcgatcatgggcggtaccggcgaggcgatggcggtgctggtctacgagtggcgctcgctgtccgccgaaggccaggcgtacatcctcggcctgcgcgacatctacgagcagatgtggctggacgtgctgggggaggcgcggctggccggctactgccagggcgatccgttcatcctgcggcgcttcctcaccggcgcgctgtcctggaccaccacctggttccgtccggaaggaccgatgagtctcgaccagctcgccgaggaggccctggcgctggtgatcaaggacgcctgatcactcggagatcaggcggaacgggtagctcagcaggaggaagtgcagggtgttgatcgaggcgtgcagcagcaccgccagcgacagccgcccgctgaagtgcaggaccatgccgtagcccagcccggcgatcccggccagtagcgcatacaccgggttcaccagcaggtgcagcgcggcgtaggcgagggtcgcgacgatgattcccggccaggcgccgaaccagcggatcaactggctttgcagcaggccgcggaagaaagcctcctcggccagcgagaccaccccgacgttcagtaccagccaccaccagaaggcatccggccacttcggctgccagctcgcggcattggtcatgatcgacagcagcggcaccacgaagaaggtcaggcagaaggccagcgcggtgatatccagcgacaccagcggctgcttcggccggcgtagccaccaggcgagcagggtaagggcgaccagggccttgtcccagggcagccagatcatctggatcggcgggctggcgctggcaaggtcccaggggaacaggcgcaggggaatgaagccgggcaggtagtggatggcgatcagggcgctggcggcgaggctcaccggccaccagagcagggtcggcagccagcgctcggcgtaggtcacccagatgatgtagagcaggacgatgaccgccgtcagcagcgcgatgtgcccggtgaagaagcccccgagcaggaacagaatgggtagaagcggtatcagacgcccgagcatgcagcctcccgtttaaaggagggattctaaaggcatttcgacccgcggatgggaaaagcgcaaggaacgaaccttctgccagagggaaacacacggggaacgaaccccaggttgcgcaggaaaaaccacgcgcggcccgcatgactccgccccgcgagccttcgcctcgccggtttttcgcccgccggggttttcctacgagacctagtgacccgccggcaggccaataggttcagcggtccttcgcctcctgcgcgtccagctcggcgttgcgttcatggatgcgtttgagctgttcctcgctcaacggcagcttcttcgccgagtcgcgtagcagcaggagtccgccgacgatggagcccagggcgaggacgatgatcaaccaggcgtaccagggcatgttgttctccctcatcgatatgaatgttcaccatacgccgggtttgcctttctgtcagacaacgctccggcgcgaggccctgtggttgagactcccggcggcgctcggaagttgcgggcggagaaaacgctgagcctggccggcgtgatgcctgtcacatgttggcaatctgacattgcttaactggcgggtatcccttcattgccccgtccgggcctgccagcgagaggttgccgatgtctccgagcgcgttgtcccgtctgttgcgcccggtggaacccctgactccggcgatgagcatcagcgacgtcgccgaccgcctgctgatgccggagcaccgtgccttcctctcgctgccggtggtcgacgacgagcgccgggtcctcggcctggtcagccgctacaccctccaggacatcttcatgcagcgtttcggccgcgacctctggggccgccatccggtgcgcgacgtcatgaaccgggcgcccctcagcgtctccctcggcgccagcctggaggaggcggcgcagcaagtcaccggtcgcctgcagtatccgatcaccgaggacttcgccctggtcgacgaagagggccgctaccgtggcctgggcaccgtgctcgacctgctgaaggccatggaggcgcgcatcgcccagcgcaaccgggtgctgcgcaaagcgctggtggacctcaaggagtcccaggcgcaactggtgcagtcggaaaagatggcttcgctcgggcagatggtggccggggtcgcacacgagctgaacacgccgctcggctacgtcggcaacaacctggcgctgctggaggagctgagcgatcccttgttgcgcctggccgatgcccaggcggcgctggtcgactgcctgggcgacccgcagtgcgacgaagcgcgcctggcgcaggcgctgcaggcggccgacgcggtgcgccgcgaagccgccgtcgaacagttgcgcgaggacctgcggcaattgttcgtcgatacccgctacggcctcggccagatcggcgagctggtttccgggctcaaggacttcgcccgcctggaccgcgccttcagcgaggaggtcgacctcaacgactgcgtgcgcaacgccgtgctgatcgcccgcaccgccatcaaggacaaggccgagatcagcagccagctcggcaagctgccgcttatcgcctgcgcgccgtcgcagatcaaccaggtgctgctgaacctgctgaccaacgccgcgcaggccatggagcgtttcggccgcatcctgctgaagagctgggccgacgagcgccaggtgttcctctccgtgcaggacaacggcaagggcatgcccgccgaggtcctcgggcggatcttcgacccgttcttcaccaccaagccggtggggcagggcaccgggctcggcctgtcgatcagctacaagatcatccagcaacatggcgggaccatccgcgtggcctccgaaccgggtcgcggaacccgcttcctcatcagcctgccgcgagagcaggcccgcgaactgaaacggagcgcctgacatgagcccatctcccgtccgcattctcttcgtcgatgacgaggagcgcatcctgcgcagcctggccatgcagttccgccgccattacgaggtgctcaccgagagcgacccgtggcgcgccctggagcgcctgaagacggaacggatacaggtgctggtcagcgaccagcgcatgccgcagatgagcggcgccgaactgctggcgcaggctcgcgagcgctatccggagaccctgcggattctcctcaccggctattccgacctcgatgccgccgtcgacgcgctcaacgacggtggcatcttccgctacctgaccaagccctggaatccccaggaaatggccttcaccctgcgccaggcggcggagatcgccagccgccagggcctgccggcgccgcccgcggccacgctggcggcgccgctgagcgtgctgctgctcgacgacgacccggaaaccctggactgcgtcggggccttctgccatgccggcgggcatcgcctgctgcgcgcgcgcaacctggccgaggcgctggtgtggctgaacaccgaaccggtggaggtgctggtcagcgacctgaagctggccggggagcataccgcgccgctgctgaaatccctggcccaggcccatccgcgcctgctcagcctggtggttacgccgttccgcgacacccaggccctgctcgagctgatcaaccaggcgcagatattccgctacctgcccaagccgatccgcaggggattgttcgagaaaggcctgaaggcggccgccgagcaggccttgttgtggcgcgggcgaagcctgccggaggtcgaccggctggccgaggtgccgcgcgacgagcgcgagaaggaacgggtcggcagcctgctcggtatgctcggccgcctgcgcgagcggctgacggcctgaacgccggcctagccggcgtcgcaaccggcggccttggtctggcggctttccaccaggcgtgcgcggagtacgtcgtagctccagttgaaggccatggtgtagggcaggaagaacaggatcaggcccatgtcgaggaggaacgcctcgaccagtccgatcgacagccaccaggcggccagcggtaccagcaccacgatcaggcccagctcgaagagcatcgcatgcagcactcggacctgcagggtgcgctggaagcccatgcgccgctgggcgcggtcgaagaggctgttgaagagcatgttccagagcatcgccacggtggagaacatcagcgtcagcgcacccatgtgcgccaggggcttgttcatcaccagcgacagcaccggcgcggtgaggaggacggccaggccctcgaaggccagggcgtggaagatccgctccttgagagtcttgtcgagggcggtgtgggtgtgggtcatggcgaacgctcccggttcgtcgttgaagtcgggctgtattgtcatcggtctttgggatagggttaaattggataccatcggaaaaaccgatatgcatttgtcgcctgaatccctcgaggccttcgtccaggccgtttccctcggctccttcagcgccgccgcgcgcaagctgggcaagagccagtcgaccgtcagcgaggccattgcccggctggagatcgacctcggcctggaactcttcgatcgcagtggccgccagccgcaactgaccgaggccgggcgcacgctgctgggacgggttgaggaggtcctcggcgcatccgaccgcctgcgccgggtcgccgcgctgctcgccggcggctcggaaccacgggtgaccctggcgctatccgacacctaccattcggcgcgctacgaggcgcgcctggccgaactggacgagcgttaccctgagctggagttcgaatgcctgatcgccgaggaccaggacgtgatcgcccaggtcagccgcggccgcgccaccctcggcctgctcgccgcgcagccgcactacccgccggagctgggcgtggcggcggtcgccgagcgtgccgagttcggcctgttcgccgccgtcgaccatccgctggcgggcctggagcgggtcagcgagcgtgacctttccgaatggcgtctgctgcgcctgaacacctatagcgagaccggcgcggcgatcaacgacggcctgccgtccagcggcgggcgctgctggtcggcgcccaactacctgttgctgctggaaatggccacccacggcttcggttgggccgagctgccgcgctggctggtcagcggctacgccaacggacggctgaaggagttgccggtgtccggctggccgcgcagccaggcggtggacgtggtctggtcgcggcagcggccgttgggaccggcggccaactggttgctggaccgcttgctggatcgcgacctgcctatctagggagggccggctgagccccggttcagccggcgaagccgccggcggcgaggaaggcgagttcctcggcgctggacgggcgaccgaggatcggattgcgatggggaaagcgcccgaagcggcggatgatctcgcgatgctcacgagcgtgggcgaggaagggctggccgagtccgtggttcagcgctaccgagcgatcctggtcggcaaggttctcggcatgggcgaacggcaggtagaagaacagccgcagcgcgtccccgacctggcggtcgaggccttgtcccagagcccgctccgcccagcgccgcgcttgggcgtcgctggcgtacatgcgcggggttccacggaaggcgttgcgcgggtactggtcgagcagcaacagcaggccgagatggtcctcggcttcatcggcagccgggcgcagcgcgttggcgcaggcaagctcgtagaggtgggtgaagcgctcgcggaagcgccggtcgaaatcggcgttcctggcgaaccagagggtagggccggcatcgcgccagaaaccgaccacttccggcagcggggacgcgctgggaggaagcaaaagcgctgcatggggcatctgcggatccaggaagtagagtagggactccaggctattggtccgggttctttggataaacgtaggtggcatggatagactgtccagccatcccgaatagagagaaggggcctgcccatggatcgtctggacagcatgcgcgtgttcctgcgcgttgccgaaaccggcagcttcaccaaggccgcggacctgctggacatgccgcgggcgacggtctcggcggcggtccagcagctcgaagcgcaactcggcagccggctgctgcatcgcaccacccggcaggtccagctgacccacgacggcagcgtggtgctggagcgttgccgccacctgctggaagacatggaggagctggagagcctgttccacgacggcagccgcgccagcggccggctcaaggtcgacgtgccgagccgggtggcgcgactgctgatcgccccggcgctgccggaattcttccgccagcatccggacatcgaactggaactgggctccagcgaccgttcggtggacctggtgcaggagggcgtcgactgcgtcctgcgggtcggccagttgggcaacagcagcctggtggcgcgacgcctcggcgagatgcaactgatcaattgcgccagtcccgcctacctggaagagcatggcgagccacggacgccagccgacctcgaccggcactgggcggtcaactatgcctcgcccagcagcggccgggtgttgccctgggagtaccgcgaggatgggcgcaccctgacccgcgcgttgcgcagccgggtcacggtgaacaacgcggaaagctacatcgcctgctgcctgtccggactgggcctgatccagatccctgcctacgacgtgcgcgagcacctccaacgcggcgagctgcgcgaggtgctgccgcagtggcgggccgaagcgatgccggcgtacgccctgtatccgcaccggcggcatctgtcgcggcgggtcagggcattcgtcgactggctggagcaactgctccgcgcccgcctctagtccacgacgttcatctccccggcgcgttccgggctacggcaaacggccggattctgcgacaatgcgcgccgttttcgattcgccgcgagagagcccatgtccgcctgccaatcccccatcatcgtcgccctggatttccccacacgtgaggccgccctggcgctggccgatcagctggacccgaaactgtgccgggtgaaggtcggcaaggaactcttcaccagttgtgccgcgggtatagtcgagaccttgcgtggcaagggcttcgaggtgttcctcgacctgaaattccacgacatcccgaacaccacggcgatggcggtgaaggccgccgccgagatgggcgtgtggatggtcaacgtgcactgctccggcggcctgcgcatgatggccgcctgccgcgagacgctggaggccttcagcgggcccaggccgttgctcatcggcgtgaccgtgttgaccagcatggagcgcgaggacctggcgggcatcggcctcgacatcgagccccaggagcaggtgttgcgcctcgccgccctggcgcagaaggccggaatggacggcctggtctgctcggcccaggaagcgccggcgctgaaggccgcccatccgggcctgcaactggtcacgccgggcatccgcccggccggcagcgcccaggacgaccagcggcgcatcctcaccccgcgccaggccctggacgccggctccgattacctggtgatcggccggccgatcagccaggccgccgacccggccaaggcgctggcggcgatcgtcgccgaactgggctgaggcggcttcccccacgcctgccgtcggcgaccgtcgcgcgccgtgtcgagccggactggcgcaggcatcatccgcgcctgtccctccccagcgtctaggcttgtagcgggcactccggcaagtaccggtggcaacggtttcacagtttcgtgaggaaaaattgcaagtgccttgccggctggccccaggccagtaggatcgctgttttccccggaaacgcgaggtcgggatgctgaacaccctggaagcctgcctgaaggcggtcgatgagattctcctgggcaaggaccgccaggtgcgcctggccctggcctgcctgctggcccgtgggcacctgttgatcgaagacctgccggggatgggcaagaccaccctcagccatgccctggcgcgggtgctcgggctcagtttccagcgcatccagttcacctcggacctgctgccgggcgatatcctcggtacctcggtgttcgacaaggacagcgggcaattcgtcttccatcccgggccgatcttcgccgaactggtgcttgccgacgagatcaatcgcgccacgccgaaaagccagagcgccttgctcgaggcgatggaagaaggccaggtgaccatcgagggcgccacccggcccttgccggaaccgttcttcgtcatcgccacgcagaacccggccagccagggcggcaccttctccctgccggaatcgcagctggatcgcttcctgatgcgcctgtcgctgggttaccccgggcgcgcggcggaacgctcgctgttgctcggcgaagcccggcgcgatctgctgccgcgcctggaacccttgctcgaccacgcggcgctggccgctttccaggccgaagtgccgaaggtccgcgccagcgatgcactggtggactacgtgctgcgcctggtcgaagcgacccgcacgcagccggccttcgccctcggcctgtcgccgcgcggtagcctggcgttgctcgccgcggcgcgtgcctgggcgctgctggcgggacgcgactatgtgattccggaagacgtccaggcggtgttgccggcggtcgccgggcatcgcctgcgcgaccaggcggaccccaccgggcacggtggcggcgcgctggtgcaatggctgctgcgcgaagtcccggcgctctgatgcgcctgcgcaactggccgcgctggcagcgctggctgaaccgacggataccgccggcgagcagcgtcgagctgaaccagcgccgcgtattcatcctgccgacccgccagggcggcgctttcggcctggcgctgctggtgatgctgctggcggcgatcaactaccagaacagcctggcctacgggttgaccttcctgctgctgtccctgggcgtggtgaccatcctccatacctatcgcaaccttgccggcctgcgcctcaccgcgttgggagcggacccggtgttcgccggcgagcgcgccggtttccgggtgcgcctggaaagcccgcggcgggcgcgccaggccatcgccgtcggctggccggagcggccgctggaatacgccgacctggcaggcgacgcggctgccgaggtgctgctgttccacccgaccgagcgacgcggctggctgcggccggggcgcctgcgggtggagagtcgctttcccctcggcctgctggtggcctggagctgggtagacctgcgccagcaggcgctggtctaccctcggccgctggccggcgagccgttcctcgggccgggcgcggaggatgccgaggaccaggggcgcgcgctggcgagcgcgggcgtcgacgactaccagggactgcgcgcctaccagccgggcgactcgcggcggcgcctgcactggaaggcgttttcccgtggccaggggctgctggtgaaggacttcgccgcgctcggtggggaagacttgtggctggaattcgagcgcctcggcggggatctcgaaagtcgcctgggccgcttgtgccatgcagtcctggaactctccgcgcggcagcagccctatggcctggcgctgcccggcacacgcctgcaaccggccagcggcgaggcccagcgcgaggcctgcctgcgtgcgctagcgttgttcggagcggcgcgatgaacgcgattccgcgggtcgcgctggtctggctgctggtggcgcaggtactggtgatcctgccgcacctggcctacatgccgctgtggatcgcggccatgtggctcggttgcgcggcctggcgggtgcaggtcttccgcatgcgtgccggctatccgcgcgcctgggtcaagctggccctggcgctgctcgccggggccggggtctggttgtcgcgcggcagcctggtgggcctggacgcgggggcggtgctgctgatcgccgcgttcatcctcaagctggtggaaatgaagacccgccgcgatgcgctggtactggtgttcctcggtttcttcgcagtggtggtgggctacctgttcgacgacggtttcctcgccgcgctgtacagcctgctgccggtgaccgcgttgctggcggcgctgatcggcttgcagcagagcgctttcgccagccggccctggccgaccctgcggctggccggcgggctgttgctgcaggcgctgccgctgatgctcctgctgttcctgttcttcccccgcctggggccgctgtggtcgttgccgatgcccggcaacaagggggtcaccggactctcggagagcatggcgccaggggatatcgccgagcttgggcgctccgccgaactggcgttccgggtccgcttcgagggcgcaccgccgccgcgcgagcagctctactggcgcgccttgaccatggagcgtttcgacggacgacgttgggctcaggcgccgcaatggtcgggcgaggatgctatgcactggcagaagcgtggccccgagctgcgctacgacgtgatcatgcagcccagttcgcagccctggctgttcgccctcgacgtggcgcagaccgaccagaccgacacgcgcctgatgagcgatttccacctgcagcggcggcagccggtcgagcaacgtctgttctaccgagccagttcctggccacaggcgctgcgcgagtccagcatcgatccgcgcatgcgctggcgcaacctgcagttgccgatgcacggcaatccgcgcgcgcgcgccctggccgagcaactgcgccaggcccatgcgcaaccgcaggcactggtcgcggccctgttgcagcgcttcaaccgcgagcctttcgcctacaccctgaaaccgccagcgaccggtgccgacggggtggacgatttcctgttcgacacgcgcagcggcttctgcgcgcattacgccggggcgatggctttcgtcctgcgcgccgcgggcattcctgcgcgagtggtggccggctaccagggcggcgagctgaatccggcgggcaactacctgctggtgcatcagttcgacgcccacgcctgggtcgaatactggcagccggagcagggctggctgagcgtcgacccgacctaccaggtggcgcccgaacggatcgaacaggggctggagcaggccctggccggggacagcgagtacctcgccgacgcaccgctgtcgccgttgcgctaccgtggcctgccctggctcaacgacatgcgtctggcctgggacagcctgaactatggctggcaacgctgggtcctggcctaccagggtgagcagcagggcgccttcctgcagcgctggttcggcgggctcgatccgacccgactgggcctgttgctcggtgccgcggcgatattgtcggtcggtctgctcgcgctgttcctgctcaagccctggcaaggccgtggcgatctgcgcagccgccaactgcgccgcttcgaacgcctgctggagatgcatggcctgcgccgttcccccggcgaagggctacgctcctacggcgagcgcgccgcccgcgtcctgccggcgcaggcgccagccatcgcggccttcgtcggcgcgttcgaagcgcaacgctatggacatggcggtgccgatgatccagggttgcgtctgcgcgcattgcgccgggcgctgccctggcgcctggtgcgcgcgcccacgcgggatggccggggagaggagcaggcatgacggggttcatcgatgaactgctggccgaggtgatcggccagcaggtggcgttgatgtcggcggtcgcccgcctggaggcgcgcacggatggcgaggcactgcacgacctgcgcatcgccctgcgccgtctgcgcagcctgctgtggccgatccgcggagtccccggcgtcgaggagctggagcatgccgccgccgaggtcgggcggctcagcgggccgatccgcgacctggaggtgctgctgccggcgctcgccgccgaagggctgcgggatgcgctggcggtgcgccggccggtgctggagtccggctacgtggcggttctcgccagccagccgctgcaccgcctgcagctttgcctggacgtctggccggccctgttgcgtacggcccagcggcatgccgtgctggatggcctgcacggccgggtgcgcaagcgcctgcgccggcaatggaagaccctgcgcgccgagctggcggacaccacctacgagcactggcacccgctacggctacggatcaagcgcgtgcgctacgggctggaggcctatccgcacgattgcagcattcccggctcgctgctggcgccgctcaaggcggcccagtcggcgctgggcgattggcacgacctcgaacagtggctgttgcgatgccagcgcgagccggacctggcgcccgtgcgcgaggtctggacggcacgcttcgaactggcccgggagcgtgccggacgggccctgtcgacattgcagcaggcgcttgccgagcactgaggccgccggtattccgatcggctttttcccaaggatcgcctcgcctaagatgggccctcgaatcccctcgcgaggcacacatgaatttttccgaattgatccaggcggtccgccgcgacccttcctcggtggtagtaccggccagttggggccagggccgcgccaccttcggtggcctggtggtggcgttggcctacgaggccatgcttgcggtggtcgaggcggggcgtccgttgcgctccatcggcgtcagcttcgtcggaccgctggcccccgagcagccggcgagcttcagcgcccggttgttgcgcgagggcaaggcggtgagccaggtacaggtcgaggtccgtcagggcgagcaggtggtgacgctggtccaggccagtttcggcgtcgcccgcgcgtcggcggtggcggtggaagcgttgccggcggccgggatgaagggccccgaagagagccaggagctgccctatatccgtaacgtgaccccggagttcactcgctacatcgccatgcgctgggcagtgggcggcctgccgttctcttcgaacaagtcgcgccagatgggcggctggatgcgtttccgcgacgaacccgagggagagcccatggaggtttcccacctgctggcgctgctcgactcctggccgccggcgctgttgccgcacctgggcaccccggcgatggccagctcgctgacctggaccgccgagttcctccagccgctgccgcagcagggcagcggcgactggtgccgttacctggcggagatcgaggaggcgcgcgacggctacggccacgtggcggcgcggatgtggagcgccgacggccagttgctggcgatcagccggcagatggtcacggtgttcggctgaggcgcatgtcaggcgggcgcgtactcggtgcggttgcgcccgccgctcttggcctggtagagcgcgctgtcggcgcgcaccagcaggctttccaggtcgtccccggcgtccctgcgcagggcgacgccgatgctcacggtcatccgcagcggttcgccgtcgggattgttcacccgtagcgcctcgacgccggcgcgcagccgttcggcgacgtccagcgcctggtccaggctgacctctggaagcagcgcggcgaattcctcgccgcccaggcgaccgagcaggtccacctcgcgcaggccctggcgcagggtctcggcgacacgttgcagggcgcggtcgccggtcaggtggccgtggctgtcgttgatgttcttgaagtggtcgatgtccagcatcagcgccacgcaggggtggcggaagcgttcggcggccttgagcatgagttccgcctggtgcaggaacgagtggcggttgtgcaggccggtcagggtatcggtgctggccagcaggcgcagttcctgctccatggccttgcgccggctgatgtcgtagcaccagatcagggtcgccggctcgccgtcgatttccaggtggcgcgcgcagatcaccgcccagcaaggcgtttccccgcatagctgggcttcccagccatccacctggccgcgcgcctccagggcgttctgcaggcggctgtattcgctggtgctggcgaacagccggggcaggttgaagtcgtcctgggcctggcaacccaggcgcttgagcaggcgtgggctgacgtaatggatgctggcgccgcaggcgctgagcaggaccacgtcgctcgggctggcctcgaggatgaaatgcagcagcgccttgccttcgctgagctggcgggtgcgctcgccgacgcgtttctccagggtggcgttaagctcgatcagatgcccggccagttgctgtgcgcgtttgaagtcggtgaccaggcgcagcaccagcagggcaccgccggcaccgatcccgagcagggcccagaacaacgcgtagaacgcccggtgcaggcgcttgcggtcgacgtccaactggttggtcagggcgatgttgctggcgacgacgatctggtgggtcggttcgagcaagggcggaacctgctggacgatctccgcggccaggcggcgcgcggcgacgggatcgccccagggggcctggttcgaccagcgatcgctgagctcgatcaggcgttgcagggtggcctgtacctccggacgcggttcggcgagatgcctgaacaacgactggcggcgcagcggcgcgatcaggctggcgaggacttcgagacggatcgccaggtcgtcggcttggccttcgccgctctcggtgtgccgcgcggcgtccagcgtgcgatccagttcggcgcgcagcgagtaggtctgccacagctcgttgtgcaggttcggctgggccagttgctgggcctggcgcaccgccagccacagcgcagccccggcgatcagcgccatgagcagcaccaggccgagcaacagccccatgatctggcgttgccggcgcagctttgtcggatcgagcagcggcacagtcatgtccgttacttactcaagagtgatggagctgacctgccagacggtacggttgtagtagacctggtttctcaactcaggatagcgggccatcgggtagatgatgaaaagcggtccgcgttcacggatcgccatgtaggcgccgttgcggcgataggcgaggatgggctggtagctgtcgaggtcgctgtacgggatgatcgccgagtagtcgttcagcgccagcacgcgcaggcgcgtgggcggcgccaggtccaggtggcgcagcaacaggctgaggcgcacgccttgccagcgggcgttggcctcgccggggagctgggcttccagggtctcgctgggcagggcttcgaggtcggacagggtcagccgtacgggagcgtcgccggaccgctgcagggtgacgatcggacgtccgcccagcggcacgggctccgcggcctgggcaagaggcagccccaggcaacagagaaagacgattaattgacgcgttgacggcatgttgtcggtccacgacaggattccgtcgattatatcggcagcgtcgcgctaaaactgaagggctgtgcaaaatcccggacgaactgtcacttatgccgttcgcgccaagcccgccaccaggcgccgctgaggacgaaacgggggaaggtgacgaactgctcgacgagcaggcgactgacagcgtcgcgccgatcgctgaatggctcgggtgcctgttcctccagcgcgtgtcccttggcctggatcgccaggccggcgccgattccgatgacaccgagtaccacctgcagcaggtccaggccgaacaggccgccgagcagcaggatcgcagcgacgatgaacagcggcacggcgatcaggtgcaggaccaggttggtcgggttgcggtggttggcggcatagccgcgccattgccaggcgagcaggttgggatgacgtttgcccatgttctcggtactccgtgacggcgacccgcggggcgggtcgttgcatgtcgtcgagtctaggcggggtgcggcagcgcggcgaatgattcctgcctatccgggcgataggcaggtgcgcctgcggatcagaggcgtagctggccgatggcgcgggtcagatcgcccgccaggtcgaccagttgctgactggtggccgccgactcgacggtctgctgcacggtgagttcggtgacgtcgcggatgcccaccaccgaacgggtcatctcttccgcgacctggctctgctgttcggcggcgacggcgatctgcgtgttgctttcacgcatctgcgccaccgcgttggcgatcgccgccagcgcctcgccggcgtcgccggcctggctgacgcaaccgtcggccttgagcgagctttcctgcatgaactccacggcgtcgcgggtgcccgactgcaaggcgaggatcatctgggtgatctcgtcggtggagtcctgcacgcgacgggcgaggttgcgcacctcatcggccaccacggcgaagccgcggcccatttccccggcccgcgcggcctcgatggcggcgttgagggcaagcaggttggtctgttcggcgatgccgtggatcacgttgaccacgccgctgatcttctggctgtcttcggccagcttctggatcatctcggcggtgtcctggacgccctgggacaacccggcgatcgacgcgctgacccggctcaccgcctgctggccggcgccggccaggcggtcggcttcctgcgactggtcacgggtatcggcggcgtgctgggcgatatggaagaccgtggtggacatttcgttgatcgcggtggcggtctggtcggtctcgctctgctggccgagcatgccctggcgtacctggcccatgctgcgggccagcgcctgggcgccttcgtcgagcttggtagcggccgcggcgacggtgccgacgatgcgctggtagccggcctgcatggcgttgaaggcgctggccatctggccgacttcgtcgcgtccctgcagcggtacgcgagcggacaggtcgccgctcttttcgacgtgcagcatcacgtccttgagggtatgcaggtgggtgaggatgaagcggatcagcagttgcgaggccgccagcagcgccagcatcagcaccagcacggcgacggcgtaggcgccggcccggtcggcgaagacctgccacaggtcgctggccggggcaagcacggcgaagcgctggccggagccggtctggccgacccaggcgccgagcagcggggtatcgccctggcgcgcgccggacaactcgatccaaccctgccccttgcccagcgcctgggcagcggtgccgcccaggctcgcggcctgttccagcggcagcaggttgctgcgggcgggcagggcgctgccggccggccagctctgaaccagctcgccctcggcggcggcggcgcgctgggcggaagcgttgcgcccggcggcttcctgctgcatggcgaacaacaccagcagcagggtggtgaagaaggccaccgcgttgacggcccagaacttgtatttcagtggaatgtcgctgatccaggtgcccatagggggatttcttcttatcggcaagctaatggcaaggcgccattatcttgaaagctgagtaaggggcaatcgttgatgcgggtcaacgagaccgttcgtcagcttagcggccgatccgccgggagcttgagggcgatctcagtcgatcgtcggcaggccgaagaacgcccgcgccgcggcgctggtgtgagcggccaggcgctccgcgctctcgccgcgatggcgggccacgcagtcgagcacctcgaccaggtaggccggctcgttgcgcccgttcttcggcttcggccgcaggctgcgcggcagcaggtagggcgcgtcgctttccagcatgagacggccgaccgggatctcgcctaccagatcatgcaggtgggtgccgcggcgctcgtcgttgatccagccggtgatgccgatgtgcaggtcgaggtcgaggtagccatacagtgcccggcgctcgccggtgaaacaatgtacgacggcggccggcaggcgatcgcggaagtcgcgcaggatcgccagcaggcgctcgctggcgtcgcgttcgtggaggaacaccggacgctgtagctcgacggccagtgccagttgttcctcgagggccttttcctgggccggacggggagagaagtcgcgattgaagtcgaggccgcattcgcccaccgcgcgtacccgcgggtcgtcgaacagggcgcgcaggccgcgagcggtgtcggcgttccagtggctggcctcgtgggggtggacgccggcggtggtaaacagccggccgccctcgtcgagttcgccgcagagctgcagcgcctgttcgctgtcggccaggctggtgccggtgatgaccatctgcaccaccccggcggcgcgcgcgcgggcgagcagtgcttcacgttccggggcgaagctggcgtgggtcagattgacgccgatatcgatgagttgcatggtgccttcctggaattcgcagcgaggcggcgccccctcgatcgcgccggacccgccgggggatgggtggcaaaccgcttgtagaacaatccgttataatcgcagatcgggttcttcggcgcccggattatctacccaatgcctccgtttgcagccgctgtcggagaggaacttgccaagactgccatgctctgattgatccggtcccccggagagggacatcgagcctggcctctggagacctggatgacgcgtctgttgctgctttcgctttgcctgctggtgctcgcacccttgccggcggctgcgcgcatcaccggccagccggacaactggcacagggaacagccggagacccgcgacctggcgagcatccgccgcgctggcgtgctcaaggtgctggtcaaccagagccgcaacagctcgggcgaggtgaagggcgagccgatcggcgtcgagtaccgtcgcctgcgcgccttcgagcaatacctcaacagccgttcgccgtccgcgcggaacctcaccctcaagctcatacccaagcccaaggaccagttgcttgccgccctgcagcgtggcgaaggcgacctggtcgcccccggcgaactgctgccggcgcacgacggcctgcaggtcagcccgagcgcgccggtgcgcgccgatgtgccgctggtgctggtggcgcgcaagggcaaccggcgctacacgcgcctggagcagttgtccgggcggaccatcccgctgccggccggcagcgccgccgagggcgccatcgaactggtcaaccagcgcctggcgcaacgccgcatggcaccgatccggatcgaaaagctggacgcttccctggccatcgaggatgtgatggaaatggtccaggcaggcatcctcggcttcaccgtggtcgagcagcccatcgccgaacgctgggccaaggtgctgccgaagctgcgcgtcgaccgccacctggtgctggacaatcgcgccgacatggcctggtacgtgcgccgcgatgccagcaccctgcgcgcgaccatcgaccgcttcctcgccgactaccgcgcgccggccgaccaggacgtggctttccagcgcgtctaccggcgcgcctacaaggtccgcaaccccctcggcgcggcggaccgcaagcgcctggaagcggtccgtccactgctgcagcgctacgcgcggcagagcagcatggactggttggcgctggcggcggtggcctacaaggagtcgcacctgaacccgaaggcgcgcggttccggcggcgccagcgggctgatgcagatcaccccggcggcggcgcgcagcgtcggggtcggcaatgtgcacgacaaggacagcaacgtgctggccgccagtcgctacctgaccaagatccgcaagcagttcttctccagcaagcacctcgacgaacgcgagcgcctggcgttcaccctggcggcctacaacatgggcccggagcgggtacagaacctgcgcacccaggcgcgtcgccgggggctcgatccgaatcgctggttcttccaggtagagcgggtggctgcggaagagataggcatgggtgtggtgagttatgtcagcagcgtcaacaagtactaccttgcatatgaacgcgaacgggttcgcctggagcccggggtgcgtgcgaagacggcgacggctcaaaaataatctataaattcgatattgataacgcgttttttacggttttaatatcgaattatcttgcctatagtgtgcccatcttatcccacacctgaggacgcaccatgaatccactgatcaagaccatcctgtcgaccaacgccggtgccggcctggccatcctgcgtatcgtcaccggtcttaccctgatgtcccacggttcgcaaaagctcttcggcatgttcggcggcgccggcctgaacggcatggcgcagtggttcgaatccatcggcctgacccctggctacctgctggcgaccctggccggcagcgccgagttcttcggcggcctggcgctggtgatcggcctgctggtgcgtccggcgtcggtggtggtgggcttcaccatgatcgtggcgatcttcagcgtgcacatcggcaatggcttcttcatcaccgacaacggctatgaatatgccctgaccctgctgatgatcagcgtggcgctgctgatcgatggcgccggcaagttctcgctggacggcaagctgtcccgctgaaccgggctggcgacgaaaaagggcggacaccttcgggtggccgccctttttcgttgcggcgcgcagcacaaggtttccgcctcgccggccacgccagggctgcacccctgagggtagcgttatccgccgaagcgcccttcgccgcgttcttggcgtttccgtgtcggtcagcgctgctcggcctggcgcatctgttccagcgcgcccaggcgcaagcgttcctgttcgctgaagcgctcctcggccaggcgttcgaccgccgcgcggcggtcggcttcgctcagcccggtattgccttcgatccggctcttctcggcgaaatagtcgtccagccggcccttccaggccgagcgttgccgatcgagttgctccaggcgggtggtggcttcggcgcccaccagttgctgacgcatctggcggatggcttccgggccggcgccagcggcctggagggcggcggtctgctgctgcagttcgctttgcagttgcggcagcacgctttcctgctggtcttccggcaggctggcgcgcaggcggtcgatggcggcggccttttcctcggcgctgagcttgccgtcctggcggatcgccaggcgctccagggtgaactggttgtaggtttcctcgtcggcgaagaacgccacgtgcgcttcgttgctgaagatccgcgcgcgcagggctttcaccgcggcttcccgctggcgcagggcgtcgaggtcggccaggcgcggcaggtcgcgttcgagcagcaccagttccttcttgtagtcgatgtattgctgcatcagcgccaacgcctggccgcgcgccggctcctggagttcggcggcgatgtaggcgcgcaggcggtccaggctttgctgcaggggctcttcgccgacggcgctgaggaagtagtcgaacaggttgcggatgtcgcgggtgatcagcaggttgccgctggcgtcgacactgaaactgccatcgacgctggtgcccctgaaggaggttggcagcggcgcgaccttggccggcatgacctggggggccggcaccgcttctcccgcggaggctgctggcggggcgtggactgcgcccgcctgcgggctggccgggggcgccgtctcgggggcgggggaaggttccagccagacgaaccaggccaggctggcggcgaacgccagtggaatcagcaggaggattttcttcacgcgagggggcttccgggaaagggccggggccgaggccccggccggggtcctacaggctggcgttcttcaggcggttggcgtgctggcggtagacgctgaccgggctggtctcgaacaggctggtgaggccgaagacctggttcacctcgtccaggtggttcatccggtagttgtcgcggatcaccatgcccaggtgcgaactgcaggtgccgaccaggccgtcgttggcggtgccgttcttgaaggtcagcgacgaggcgccgaggaaggcgtcgctcggatcgaggaagttggtcagcggcgaggaaccgctccaggagtaatagctcacgccgttgaccttgtaggcgccctcgccgcaggccgaggtggggacgccctgcgggtacttggcgttgaagcgcgcggccccctcgctgttcagcgactccagcgagcccagtgaattctgcgtaccggtgctgccgctggaaaggaagctgatcagcgcgccgaggctgttgaccagcccggagaggattgcctcgccggccgaacccggtgggatctggcgcaggaagtcggcggtgtccgaacccttgtgcggggcgccgacgctggtggcggaagcgatcaggtcgggacgtacggcggcgacgtagcggatggtcggcccgccgtggctgtggccgatcaggttgaccttgggctggccgctgagggcgacgatttcctccacctgttgcagcaactgctcgccgcggacttccgaggtgtccaactggctgacttcggtgacgtagacctgggcaccgtcacggcgcaaggcgctgggaatgccgaaccagtagtcgaccccgaggatgttgtcgaagccgagcatgccgtgggccagcacgatggggtatttggtctgggtgtaggtgctggcctggatcagagggctggcagcgagagaggcgaggccgatggccaggccgagggggagcagagacttcttcttcatgttgttctcatctcaggttgatggggccgaggggcgcgtcctgccagccatcgcccgaatccttccgggagaaccgcttcgctgtcccttgcgcaggaaccgtgccagcttcggcttttttcctccaggccaggaaatccgcggcttcctggcggccggtcataacctgcgtggcagagcggaagaggcgggttgttacggcgcgaaacgctcgtttgaatcttccccgcacaacgcccagcgaccgagtgtgcggtagcgcacgcccgcggcgtcgttttgcgagcaaaacaggctgaaatggtcgacctgccatacgaaggttgggggtggcggggcgtcctccagcggcgcggcatcgcgagccagggtcagatgggcgctgaaggggcgggtttccacgggcagctccagttcggcaaggccggagcgcagggcgcggcgcaggcgcaggagggcgccgggcggttggctgggggccagcagcaggatgccgtttctccagcgcagcaggcggtcgagacacaggtcgaagggcgcggcctcgatggccgcggccatgtccagcagggcctcgagccgagcggacgggacctgcccgaggaaggccagggtcaggtgcaggttcgccgtcgccacctggcgtccgggcagtggccggtcatcgcgccaccggccgatccgctcggcgaggggaggtgggcagggcagggcgaagaacaggcgaagaaagcgatcgggcatgggcgcctccgcgtgtttcttgacagtctccatgcggcttttctaggatgcgcgtgcgccgatttaaacagcaacttgcggggcgcccggcagcagccgaaataccgctaaagcgctggctcggtgttgcctctcaccgctgtccagcgggaccgaagaggcggagacatgacgtcatgacctgtcccagcacgcaattgcgcctggcacccatcaccaccggcctggtccggcggaacccgaggattctcctcagcggcccgcaccagccgaccctcgtccgttacctcgaaggctggccgaagcgctggaacggttcgcgtaccttccttatccagttcgcccaggacggcaaggacctggcgcgcttccccagcgacgcgttcgacttcgccgtggtccaggcccccgaggcggaagacctggacctggtggtccggcaactgatccgggtcgcccgccagggcctgatcacccgccgcatcctgcgctgagcgcgtggcctctcagggcgccggcggatactcgatctcgacgacgaaccagagcttttccccggccggggtgcgcaccagcacctcggcgtccagctccttgccgaccagtgcgcgggcgagcggcgagtcgatgctgatctggttgttgcgcaggtccagttcgtcggggccgacgatgcgatagcgggcctgctcgccgtcttcgtcttccagggtcacccaggcgccgaagtacacccggttcggatccgccggccgctcgccgaccactttcaggttctccaggcgcttgcgcaggaagcgcacgcggctgtcgatctcgcgcagcatcttcttgccgtagatgtattcggcgttttccgagcgatcgccgagggcggcggcttcgctgaccgcctgggtcacctggggacggcgcacgtgccagagttcatgcagctctgcgcgtaaccgcgcggcgccctccggagtgatcagcggggtgccggcggtgcgcggtggacgatagcgactcatggttcgggtggttccacaaatgaacggatgaaagcctgccagtgtatccgatcagccctcgcgcaggacccgcagcgggctgctgttgagggcgcgacgggtgcccagcaggccggcgccgcctaccagcacggcgcccaccagaggcagcgcgagcaaccagggatgcgcttgccacggcaggtcgaagaccagtcggtagagcagcaggctgaccgcctcgcagccgagcgccgcgagcaggccgctgactgcgccgagcagggcgaactcgacccgccgggtacgttgcagcaactcgcgctcggcacccagcgcgcgcagcagggcaccctggcgcacgcgctcgtcgagggtcgcctggagaccggcgaagagcaccacgaagcccgccgcgagaacgaacaccagcacgtactccacggccagggtgacctggtcgaggatgctccgcagctggctcagcagggcgtctaccggcagcagggtgacggtggggaaggcgcgggccagttcgatcaggtcgcgttcctggctggccggcaggtagaagctggtcaggtaggtcaccggcaggtcggtcagggtgccgggctggaagaccatgaagaagttcggctggaaattgtcccacttcaccttgcgcaggctctggacctggacctcgcgattctgcccggcgacgctgaaggtgagccggtcgccgacctggatacgcaggttggcggccagcttctcttccaccgacacgcccggcagggcccccggctgcggcgcgctccaccagcgtccggcggtgagctggttgccggagggcagtcgctccgaccaggtcaggccgaggtcgcgctgcagggcacgctcgctgcgcacgtcttcgtcgagcgcctggaccggcttgccgttcaccgctaccaggcgcccgggaaccatggggaacagcggctcggcgccgggggagagcttttgcacgcgacgttcgaaggcgtccttttccgtcggcaggatgttcagggcgaaatggttgggggcgtccggcggcaactgggcctgccaggtatccagcagttcgccgcgaagcagggcgatcagggccatggccagcaggatcaggccgaaggccaggctctgtccggcggcggccagcgggtgccgcaacaactggccgagtcccagccgccatggcaggctggcacgcgccagtgcccggcgcaggccgttcaggccgagcagcaggagggcgccgagcaccagcgtggcgaccaggccgccgccgagcagggcgagggtcagcttcaggtcgagactcaaccgccacatgatcaggcccagggcgagcagggcgcaggcgtaggccatccaggtgcgcatcggcaccggcagcaggtcgctgcgcaggacccgcaacggcggtacccggcccagggctgccagcggcggcagggcgaagccggccagcgctaccaggccggtggcgatcccggcgaaggcggggaacaggccgccggctggtacgtccggcggcagcagcgtggcgagcaggcggaacaggccgagctgtgccaaccagccgagcagggcgccgatggcgctggcgagcaggcccagcagcaacagttgcagcgcgtagaggagcagggtttcgctgcgcgacagaccgaggcagcgcagcagcgcgctggcgtcgtagcgccgtgcagcgaaacgagcggcggacagcgccacggcgacgccggcgagcagcaccgcggccaggctggccaggttcaggtagcgctcggcacggccgagggcatcgcccacctggcggttgccgtcgcgggcatcctgcaggcgctggttggcggcgaggctgcccttgacctgctggcgataggcctggagggcttccggcgggccttcccacagatcgcggtagcgcacccggctgcccggctggaccaccccggtggcatcgaggtcggccaggctcatcatggcgcggggcgtcaggctgtagaagtcgccggcgcggtccggctcgtaggtaaggatgcgcgcgatgcgcagcggcttgcggccgatctcgatgctgtcgccgaccttcaggtcgaggctgaccagcaggcgcgattcgacccatacctcgcccgcctgcggacgaccgccggcctgctcggcggcgaacggcgcggcagcgctcttgagctggccgcgcagggggtagcggtcgccgaccgccttgatgctgctgagctggatgccctggtcggtggcgatcacgctggaaaactcgacgctgtcggcgtggcgcaggcccagacgggtgccgcgttcgatctgttcggcgcttgccggctgggtaccgttgagcaccaggtcggcgccgaggaactcggcggcgcgggcgagcatggcgccgttcaggcgggcgctgaaatagccgatggcggtgctcgaggcgaccgcgatcagcagggcgaagaacagcacgcgcagctcgccgctgcgcgactcgcggaacaattggcgaccggcgaggctcagcaggcgggagaggggcaccggcttcatcagggttcgacccggtcgatcaggcgaccgctttccagacggatcaggcgccggcagcgatgcgccagacgctcgtcgtgggtaaccaggaccagggtggtaccgcgttcgcggttgagttcgaagagcaggtcgctgatccgctcgccggtggcgctgtcgaggttgccggtgggttcgtcggcgaacagcacgtccggctccgccgcgaaggcacgggcaatggcgacccgctgctgctcgccgccggagagctggcgcggatagtggcccaggcgttggccgaggccgactcgctcgagcagttctctggcgcgctggcgagcgtcggcgcggccttccagctccaggggcagcatcacgttctccagcgcatcgaggctgtcgagcaactggaacgactggaatacaaagcctacatgggccgcgcggacgcgcgcccgctggtcctcgtcgaggtcgccgagggcgtgcccggcgagacggacctcgccgccgctgggctggtcgagcccggcgagcaggccgagcagggtcgacttgccggagccggagctgccgacgatcgccaggctgtcgccgcgggcgaggtcgagggagaggtcgtggaggatggtcaacttgccttccgcgctaccgacaaccttgctaaggttctgcgcgttgagaatgctggcgctcatggaggttccgatgcgtgcattgctgttgagcggctgcctggccctggtcctgctgacccagcaggccgcggcgcagacgctgttggtcgtgggcgatagtatcagcgccgctttgggactggataccagccagggctgggtcgccctgctgcagaagcgcctcgccgacgaaggttacgactaccgggtggtgaacgcctcgatcagcggcgacacctccgcgggtggcctggcgcgcctgccggcgctgcttgccgaggagaagccggcgctggtggtgatcgagctgggaggcaacgacgggctgcgcggaatggcaccggcgcaattgcaacagaatcttgccagcatggcgcaaaaggcccgggcggaaggagcgaaggtgctgctgctgggtatccagttgccaccgaactacggcccgcgctacatcgaggccttttccagggtctacggcgcggtcgcggcgcaggaaaagaccgccctggtgccgtttttcctcgaaggggtcggcggggtccaggggatgatgcaggcggatggcatccatccggcgctcgccgcccagccgaggctcctggaaaatgtctggccgacgctgaaaccgctgctttgagacttccccgggaaaccgctttcggctaaggttgcgcacccctcaggagccccccatgccgcgtcccgcctggaccctctacgcctatcaactgatcgagcccgacgatcagctggacctgttcgcctgtcgcgaggtccgggtgcatgtggtggcgcgtcagctggagctggataccccggcggaccgcacgctttgcggcaagctgctgccggcccagccgcgctggcagccgctggaacgggcgcgtctgcgcgaccggctgctgtgtcccgattgccggaaacaactggaggcggaaaagcgcggggagcgcctgtcctggttggtctgagccctcccggtgaaacctggcggggtgttacactgtctttcctactccttcatcgcactcgccaaggattctccggaatgttgtcgcgcgtacccgttgtctcactgtctttcgccgcgctgctttcggccggctccgcatcggccctggaactgcagctcccgcctccgggcgaggacgtcgtcggccaggtccaggtgatcaaggccaagtacgaggacactttcgccgacctcggcgagcagtacaacctgggctacagtgaaatggtcgccgccaaccccggtgtcgatccctggctgccgggcgtcggcaccgaggtgatcatccctacccgcttcgtgctgccgcctggcccgcgcgaaggcgtggtgatcaacctggctgaataccgcctgtactactacccgaaagggcagaacgtggtgcacacctatccgctgggcatcggccgcgagggctggggttcgccgatcgcgaacacccgcatcaccgccaagaccaaggacccggcctggtatccgccggcctcgatccgcgccgagcacgccgccgatggcgatccgctgccgaccgtggtgccgccgggcccggacaatccgctggggccgtacaagctgaccctgggcgtgccgggctacctgatccatggttcgaacaagaagttcggcatcggcacccgcaccagccatggctgcttccgcatgtacaacgccgacgtgacccacctgttctcgatgatcagcgtcggcaccagcgtgcgtatcatcaacgagccctacaagttcggcgtgagcaacggcaaggtctacctggaggcgcatacgccgctgaacgaccatggcgacccgtcggtggtggacaagcacaccgcggtgatcaacaccctgctcaagcgcgacgacctggccaagcgtatccagttgaactgggacgtggtccgcgaagtggtggcctcggaggatggcgtgccggtggaaatcgcccaggaatcggcgccggcgatgaccgcgacggtggatagcgatcctacccagcttacgccctgacggagagcgtcgaggcagaggcccgcgtacccgcaagggacgcgggttttttcatgcccggcgaaacgcaggcataaaaaaaccggccccgagggaccggttttcaacaggtcgtgagacctattacttgcggctggctttttccagcatgcgcagggcacgctcgttagcctcgtcagcggtctgctgagctttctgagcagcgcccagagcttcgtcagccttgcgataggcttcgtcagcgcgagcctgagcacgagcagctgcgtcttcggtagcggtcagacgagcttcggtttctttggagtggctgctgcaaccggtggccagaacagcagccagagccagagcagagaatttcagaacgttgttcatcgtgttccccttaaggtggacatttccataacagcaatctccccagccggggaaattagccggctacatactacccattacttgtagtaagtaaactgaccaagcgcaagccgagcaactttttttttagtccccccgactttagcagtagttggagtgtcgtttgttcaaaaaatatccagcgtgcggcgcaagtaagcaatttcccggaccttgggtagagttgctgcaagaggcgggggatgagggctgccgggttgtcgagaatgttccgccggagtggctggcgcttatcgacttggcggggagtggcaagtaacaactaagttgccagcatgttgccggaaatgccgtaagtattggtgcggaaatgaaaaaggcccggctaacttgattagccgggccttcttgcgatctggcggtgagggagggattcgaaccctcgatacggtttcccgtatacacactttccaggcgtgctccttcaaccactcggacacctcaccaggttctcgacagcgccgtgtctgtcgaggcgcgcaatttactcgaacatttcccgcttggcaaatatttttttaactttttcatcggcttaggtcgtcggaggaaagtccgcggggtgccttggtagactgccgggcacgaagaggagaggcggatggcgagctgggagattttctgtagcgtggtcgacaactatggcgacattggcgtcacctggcgcctggctcgccaactggccgccgagcacggtcaggccgtgcgcctgtgggtggacgagccgcaggccttcgcccggatctgtccgcgggcggacccggcggcgcacgtgcagtgcctggatggggtcgaagtgcgtgcctggggccgaccgtgggcaccggtggcggccgccgatgtggtgatagaggccttcgcctgcgaactgccggaggcgcaccggcaggccatgcgcgagcgcaagcggccgtccctgtggctgaacctggagtacctgagtgccgaggaatggatcggcagttgccacgcattgccgtcgctgcaggcgtgcgggctttccaagtacttcttctttcccgggttccgcgagcccagtggcggcctgttgcgcgaggccggcctgctggaacgtcggcgccgtttccaggcctccgtctcggagcaggatgagtttctcgcctccctcggcgtgcggcggaaggttggcgagcgactgatttcgctgtttgcctacgaaaacccggcgctgcctggctggctggaacaactgcgcgacgcccgccagccgagcctgctgctggtgccggaagggcgggtgctggcggatgtcgccgattggctgcgggtggctaccctggccgtcggggacgtccacgtgcgcgacgcgttgcgggtccaggtgctgccgttcatggcgcaggacgactacgatcgcctgttgtggtgctgcgacctgaacgcggtgcgcggcgaggattccttcgttcgcgcgcagtgggcgggacggccgctgctctggcacatctatagacaggaagaggaggcgcacctggcgaagctcgaggcattcctcgaactctattgcgccggcctgcccgccgacctggcggaaaacctgcgcaccttctggctggcgtggaacgccggcggtggacttgccggggcctgggaggggctggagaggcaactgcccgagtggcgtcgggaagcgcagcgctgggccgacgaacagggcatgcgtccggatcttgcggcaaggctggtgcaattttacgcagattggctatgatacgcggcctgattttttgtctttcatccatcggatattcgtatgaaaaccgctcaagagttccgcgccggccaggttgccaacatcaatggcgctccctgggtcatccagaaggccgagttcaacaagtccggccgtaacgctgccgtcgtcaagatgaagctgaagaacctgctgaccggcgccggtaccgagaccgtgttcaaggccgacgacaagctggagccgatcatcctcgatcgcaaggaagtgacctactcctacttcgccgacccgctgtacgtcttcatggacagcgagttcaaccagtacgagatcgagaaagacgatctggaaggcgtgctgaccttcatcgaagacggcatgaccgacatctgcgaagccgtgttctacaacgacaaggtgatctcggtagagctgccgaccaccatcgttcgccagatcgcctacaccgagccggccgtccgcggcgacacctcgggcaaggtgatgaagaccgcgcgcctgaacaacggcgccgagctgcaggtttccgcgttctgcgaaatcggcgactcgatcgagatcgatacccgcaccggcgagtacaagtcacgcgtcaaggcctgatcctttcgtgcgacgagaaaaagcccggcattcgccgggctttttcgtttccgctgtccgccgccgcggcgcggagagtcggaagcttcagaccgacacgttcaggcgtacgtcgatattgccgcgggtagcgttggagtaggggcagacctggtgggcggcggctaccagcgcttcggcggcttcgcgctccaggcccggcaggttgatgtgcagttcgacctccaggccgaagccgccgggaatctggccgatgccgaccttgccggttatcgaggcgtcggcgggaagggtctgcttgcgctggccggcaacgaacttcagggctccgatgaagcaggcggagtagccggcggcgaacagttgttccgggttggtggccgcgccgccctggccgcccagttcgcgcggagtgctgagtttcacgtcgagcacgccgtccgaggataccgcacggccgtcacggcctccggtggcggttgcggttgcggtgtagagagccttgatggtttgcatgagggtcacctgtctgatttgtgcgttaagttcttgcgcgctaagtaagtgcgtgaagtgaaatttatcgtcatgttattttgtgcgcaagataaatcgttggaagatttggcgataaaaaccagtcaggtaggtataagcccctcaatccggtgcttgcaggttgccgcgcagggccagcagctcatcctttagggcgaccagttgtggcaagtcgaggccggtactctccaggatgcaggcgggaatgctctcggcctgtcgctgcagggcgcggcccttgtcggtcaggcgcagcaggactacccgctcgtcttcgctgctgcgagtgcgggtaatcagaccttcgccctccaggcgcttgagcagaggcgtgagcgatcccgggtcggtaagcatgcgtgcgctgatttcgcccacggtcaggccgtcgcgttcccacagcaccagcatggcgatgtactgcggataggtgaggccgagcgcttgcagcaggggcttgtagaccttggtcatctgcagcgaggtggaatacagggcgaagcacagctggttgtccagcttgagctgctcgcaaggggtggtgggcagtcgggacatggctgtcttccaagtaagtagggcactgtgcatgaatttagcgtagtggctattggctttccaggtttcccgccgggtggtgtcctcagcgctcgccgagacgctgctgcagggcctggtcccagggcggcggaaagccgaagcgctcgcggaggaaagccagcagcagacgggttcgcgaactggcttcgcgttccaggcgcagggcatagatgcaggtgggctcggcggcgggcaagccgtcgtcgcagaacagcgcctgcagttcgccgcgcagcaggtactcgctgcacaaccaggtcggcaggtgggcgatgccgaggccggccagcgccgcgtcgaccatcgcttcggcgttattggtggccagccgcgcccgtttcggccgcaggtgctggagcttgccgtcgtgctggaagcgccaggcatagggtggcgacaggttgtcccaatcgatgccggcatgctccggcagttcgcctggggatgcgggaacgccgtgttcgcgcaggtattccgggctggcgcagaccacccgcaccatcggcgccagcgaggtggccaccaggcggctgtcgggtagcgggccggcgcgcaacaccaggtcgacctcgccgagatgttcgccctgcaggtcgatgaagctgccgatcaggcgcaattgcacgtcgaggccggggttggccttgaggaagtcggcgaccgccggggccaggtggcggcggccgaagggcaccggggcatcgatacggatcaggccctgcggcgcggtgctcagggacaccgcttcggcacgggccaggcgcagttcggtgacgatccgccgggcgcggtcggcgaaggccaggccggccggagtagcgcgcaccgcatgggtggtgcgcaccagcagagtgctgccgacggcgcgttccagggcgtccatccggcgcgccacggcggacggggtgagcgggtgcttgcgcgcagcggcggagaagctgccgccatcgaggacatcgaggtagagaacgaactgttcgctgagggtatcgggcaacatgctcatgcctttgcgtaattggcatagccattgtgctttcttgtgcgtttcccatccagccacgcttgcctagcatggaggcgtcgaaagaggggctgacatgctggatgtatttctcgatttcctgctggggatggtgctcggttgcctgggcggtctgttcgggataggcggcggcttgctggcgatcccggcgctgggggtgatcttcggtctcgaccagcaactggcgcagggtaccgcgctggtgatggtggtaccgaacgtggtgctggcgttgtggcgctaccaccagcgcaaccgcatcgatccgcgccaggccggagtccttgccctgaccggcctgctttgcgcgttcctggcgtccagcgtggccgcgcggatcgatgcggcgcggatgcgcgaagcgttcgtgatcttcctcctggcgctggccggctacatgttctggcgcctgttccggcgcccgccgcagggcggcgcgacgccgcgctacggtttgccctggatgggcgtgctgggccttggcgcgggctcgctcggcgggcttttcggggtcggtggcggggtgctggcgacaccggtgctgacttcggtgttcggcctcgcccaggtcgtcgcccagggcctcgcgctggccctggccgcgccgagcacggcggtggcgctggggacctacgccatgcacggccatgtcgactggcggatggggatccccctggcgctgggcggcctgctgagcatttcctggggcgtgaggctggcccacgccttgcccgagcgcagcctgcgcatggccttctgcgccttcctcgcattgtgcgcggtgctcctgctggtgcgcggttgagtcagagacggaagccctcgccgatgtattcggcgagcttctcggtgaccggtgactggctgtgcgggttgcgcatcagcatgatgctggccgagggcagggcgggcaggccctcgctctcgtcgaggatgcgcaggttgccggtgagcaggctgcgcagttgcacggtcacggcgaggccggcgctgaccaccgcgaacagcgccgacaggctggggctgctgtaggcgatgcggtagtccagttccgccgcctccagggcgttgcaggcccaggcccggcaaaagcaggtggtgttgaacatggccagcgggatcggccgctggtcgtgggggcagaagccctcggcggccatccagacgaagggctcctggcgcagcaactggccgatctcggtgcccggctcgcgggtgacgatggacaggtcgaggtcgttgcgcgccagcaggttgagcgaggtgtcgcaatgcacctcgacctgcaccagcggataggcttcggcgaagcgcgacaggatcgccgggaggaagcgcatcacgtagtcgtccggggtgccgatgcgcaccgaaccgaccatgtgcgggcggcgcagggtgttgaacacctcgccgtgcagcttgaggatccgccgggcatagccgagcagcacctggccttcggcggtgaggcgggtctgccttccgtcgcgctcgaacagcgagcgctgcaggacgtcctcctcgagccgcttcatctgcatgctgaccgccgactgggtgcgattcaccgcctccgcggcgcgggtgaaaccaccgtgctcggcgatggcgacgaaggtgcggagcaattccgtatcaatgccgggctggtagctcattcatcaatctccaagatgcattgcataagaatgattcgttggattgatcctatgcctggcgggacactgtgcctatcccgaacggagggcaagacgatgaaaggtcaacaggattatttcggcagtcacttccacgctgcatcccatcccgcctcgaccgctgcgccgtcgttgtggcgtcgctggcggcgctggttgcagttggcccgcgagcgccgggaactgctgaggatgagcgacgaagcgctgaaggacctcggcctgagtcgggcggatatcttccaggagggcgagcggcatttctgggacgacccgctgcgtcggcattgagcgaaccgcagcggcgcgccaggctggcacggcggcggaggcgcgatagactcgcagtctccttcatcgactggggcgctccatgagtctttcgctttccctcgccgaagcccgccgcctggccctggccgcgcagggcttcgacggccggcggacgcgccgcagcgtgcagcggcggcatctgcgcgaaatgctcgcgcgccttggcctgttgcagatcgattcggtgaatgcgctggtgcgctcgcactacctgccgctgttttcccgtctcggtccctactccatgacgctgctcgacgaggcggcctggagtgtcggccgtcaccgccagttgttcgaatactgggggcacgaggcctcgctgctgccgctggaacactacccgttgatgcgctggcggatgcgccaggccgccgacggccagggcatctaccagcaactggcacgtttcggccgggaacagcagccactgatccgccaggtgttgcaggcggtgcgcgagcaaggtgcgctaggtgccggcagcctgagcacgcggcaggagcgggccggtccctggtgggactggagcgcggaaaagcatgcgctggaatggctgttcgccgccggcgagctgacggtggccggacggcgcggcttcgagcggctctatgacctgccggagcgggtgtttcccgcggaattgctggcgcgccccgagctttcggaggcacaggcccagcgcgagctgttgcggatggcggcgagcgccctgggcgtggccaccgaaaaggacctgcgcgactactatcggctgagcccggcgcagagccgcgcgcgcctcgccgaactggtggaggctggcgagctgctgccggtccgggtcgagggctggagccagccggcctactgccccggcgaaccgcaggtgccgcggcggctaggcgccagtgccttgctctcgcccttcgactcgttggtctgggagcgggcgcgggccgagcgcctgttcgatttccgctatcgcctggagatctacacgccgaaggaaaaacgcgtgtacggctactacgtgctgccattcctgtacaacggccgtctggtcggccgcgtcgacctccgcgccgagcgggcgcgcgagcgcctggcggtgcatgcgttgcatgccgaggcgaacggcatggacgatgccgccctgcacgagctggccgagcaactgcgcagcatggccgcctggctgggcctggcgacggtggcgatcgaggggcgcggggagttggcggtacgcttgcgcggggtgctgctctagcgagcgctcccgccgggcggcgggagcggccgcggcgcgctcagcggcgcacctgcttcagggtttcggcgatcaggaaggccagctccagcgactggtcggcgttcagccgcgggtcgcagtgggtgtggtagcggtcgctgaggccgtcttcggtgatcggtcgcgaaccgccgatgcactcggtgacgttctgcccggtcatctcgatgtggatgccgccggcgtagctgccttcggcctggtgcacctcgaagaactggcggacttcggcgagcacgcgggcgaagtcgcgggtcttgtagccgctggaggccttgatggtattgccgtgcataggatcggaactccacagcacctggcggccctcgcgctggatggcctggatcaggcgcggcaggtggtcgccgaccttgtcggcacccatccgcacgatcaggttgaggcggcccggatcgttgtccgggttgagaatatcgatcaggcggatcagctcctcgctgtccatgctcggcccgaccttgaccccgatcggattgcccacgccgcgcagcatctcgacatgagcgccgtcgatctggcgggtgcggtcgccgatccagagcatgtgcgccgagcagtcgtagcactcgccggtcaggctgtcgcggcgggtcagggcttcctcgtagttcagcaggagcgcttcgtgggcggtgaagaagctggtttcgcggagctgcggcgcactgtccaggccgcaggcgcgcatgaaggcgagggtctcgtcgatgcggtcggcgagttgctggtagcgctcggccagcgccgagttggcgatgaaatcgaggttccagcggtgcacctggtgcaggtcggcgaagccgccctgggcgaaggcgcgcaacaggttgaggctggcggtggactggtggtaggcctgcaacaggcgctccgggtccggcacgcggctcttctcgtcgaagccgatgccgttgacgatgtcgccgcgataggcgggcagggtcacgccgttctgcgtttcgtcgccggaggagcgcggcttggcgaactggccggccatgcgcccgaccttcactaccgggcagccggcggcgaaggtcattaccaccgccatctgcaacagtaccttgaaggtatcgcggatcttcgccgcggaaaattcggcgaagctttccgcgcaatccccgccctggagcaagaaggcgcgtccggcggtgacttcggcgaactgccggcgcagctcgcgagcctcgccggcgaagaccagcggcgggtatccggcgagggtctgctcgaccctggccaggtgcgcggcatcggggtactcgggttgttgctggatcggcttggccctccagctctcggggctccaggactggctcatctacgactcttggcaatgctcgggaaagcggattgcggcatggtagagcagctcgccgcagcgccgccagcgatcgttgcaatagcggaaatccatcgtcgggccggctttgctatgctgcggtgcttttgccggagcgcctggcgatagccggcgaagcggcggggggaggtgagtggtgagcgaagaacgtctgctggtcgaggagcgcgacgaatacggggtcatccgggtcatcgagtccggcgactatcgcttcctcgagttcggcgacggtgtcgagcagagctgcgtgttcatgcccgatccagcctggctggaatacgactacacccgcgccatgctgctcggcgggctctgccattcgcaaccgcgtcgcgcgttgttcctcggtttcggcgccggcagcctgacccaggcctgcctgcgccacctgccgctggaggaggccgaggccatcgagctgcgcccggcgattccgcgcctggcccgcgagcatctggggctgcgcgacgacccgcgcctgcgattgcgcatcggcgacgcactggagagcctgggcgaatgcgcggaggccgacctgatcttcctcgacctctataccgataccggcccgtcggccgcgcacctggcctggaatttcctcggtgcctgccaggagcgcctcgccgaggatggctggctggtgatcaaccagtggagcggcaccgatggcaagccgctgggcgcgccgctgctgcgcgggcgctatcaccatcattactgggagtgtccggtggccgagggcaacgtggtgatgctggtgccggcgaacctggccctcgaactcgaccaggaagccctgcggacgcgtgccgcggcgctggagccgcaactcggctattcgttgcagggctatatcgacagcctgcgcccggcccagtagccagggcgcgcggacaagggcccggctagcgtccttcgaagcgtcccgggcggcgttcctggagagcgcgcaggccttccttggcgtcctcgctgtcgagcaggcgcctggcggcttccggcaacgcagcggcggcgaccgcttcgccttccagcagggcctggcgcgccgagccgagggtggcgcgcacgcccagcggcgcctgggccgcgacccgttcggcgagggcgatggcgtggtcgaggaggtcctccggggcggtgacttcctgcaccaggccgagacgataggcttcgtgggcgtcgaattcgtcgccggtgagcagccagcgcatggcgttgccccagccggcgacctgatgcatgcgcagtgtcgcgccaccgaacgggaggattccgcgctgcacttcgagctgggcgaagcgcgcgttgctggcgcagaggttgatgtcggccgccagcatcagttcgatgccgatggtgtagcagtagccttgcacggccaccaccagcggcttgcttggacgccggccgccgaaggtgccccagggatcgacggcgccttcggggagtttccagccctggcggaaggtctcgccgacattggccaggtccagcccggcggtgaaatgctcgccgtgggcgaagagcagggcacagcgcaactggtcgtcggcctcgtattcgccgagcgcggcgaccaggtcgtcgagcatcggcaggtcgaaggcgttgcgcttggccacgcggtcgaggccgagcagcagcaggtggccgcgccgttcgcggctgatgcgtcctgggagggtgtcgttcatgcggcggtttcctggcggggggcgggcaacgtcggtatagacgtctggaatcgggatgtccattgtcagtctctccgatgacgcatgtcggaaaaaacgcacacaaacgtcaaaattccggtatgatgcgcgccggtcaaaactgaccccgttcaggacctgcatttttcggagcgctgtgctctggctgtgtatccgctctgcggatttcctttacgtaatcttctaattcaaaagcaatctcgcaaatccccgccccagctgcctgggtggccgtttcggccgtacagggcatgagcagccatgggtcatgggtctttgcggatgtatacgaggcaaacccatgactcaggaaaccgtcggcttcgccgcgctcggtattcaccccaatgtgctcgcggcaatcgtcgccgtaggctacgaagagccttcgcctatccaggctcaatcgattccgctgatcctcgaaggccacgacatgatcggccaggcgcagaccggtaccggcaagaccgccgcgttcgccctgccgctgctgtcgcgcatcgacccgagccgccgcgagccgcagatgctggtgctggtgccgacccgcgagctggccctgcaggtcgccaccgcctgcgaaacctattccaagcaattgccgggcgtcggcgtggtcgccgtctacggcggcgcgcccatggggccgcagctgaaggccctgcgccagggcgcacagatcctcgtcgctacccccggccgcctgtgcgaccacctgcgccgcgacgagaagctgctggccaccgtccagcgcctggtgctcgacgaagccgacgagatgctcaagctcggcttcatggacgacctggaagtgatcttcgaggcgcttcccgaatcgcgccagaccgtgctcttctcggcgaccctgccggcgtccatccgtggcatcgccgagcgccacctgaagcagcccaagcacgtcaagatcgccgccaagacccagaccgtggcgcgcatcgagcaggtccacctgatggtccatgccgaccagaaggccggttcgatccagcgtctgctggaagtcgagcagttcgacgcgctgatcgccttcgtccgcaccaagcaggccaccctcgactacgccgaattgctcgagcgccagggctaccgcgccgccgcgctcaacggcgacatgccgcaggcccagcgcgagcgggtcatcgagtcgctgaaggacggttcgctggacatcgtcatcgccaccgacgttgccgcccggggcctggacgtaccgcgcatcacccacgtgctgaacatcgacatgccctacgaccccgagtcctacgtgcaccgcatcggccgtaccggccgtgccggccgggaagggcgcgcgctgttgctggtgactccgcgcgagcggcgcatgctgcaggtgatcgagcgggtcaccgggcagaaggtcggcgaagtccgcctgccggatgccgagaccgtgctggaggcccgcctggcgcgcctggccgcgagcctgacgcccttgctcgacagcgccgtcgagcagcgcggcgcggtgcgcgacgagctgtgccgtcgcctcggctgcgatgccgagaccctggccgccgcattgctggcacgcctgaccgtcggcaaggcgctggacctggagtcggtgcgccgcgaacagccgctgaccccatcggcaccgcgcgagcgtgccgaccgtggcgaacgcggcgagcgcggcgagcgtccggagcgcagcggcgagcgtcgtccgatggcgccgccgagcgaaggccgtgcccgctgccgcactgccctcggcgcgcgcgacggggttgcggcgaagaacctgctgggcgcgatcctcaacgagggcggcctgtcccgcgaggacatcggtcgcatccagattcgcgataccttcagcctgatcgagctgcccgaggccaatctcgagcgcctgctgaccaagctcaaggacacccgcgtcgccggcaaggccctgcgcctgcgccgctatcgcgaggactgaggtccagcgcgatgaacaaaagccccgcttcggcggggctttttcatgggcttgatgtttgctggccagactgtttttcgcgcctgccccggcttctcgtttcgtcaccccgggcgagcccctctggcaagcgtctaaaggaaacaaaggactcgcccagccgccagggcaggcaccacgtcgtgcatgtcagacctgcacataccgaggccctgatccgccgcctatccatgacatcgcggataacgcctatggcgttattcgcgctacaggactatgtcgctcgcgatttcctggctgccagccgagtccacccagcttgcggcgggaagccgatgctctccgccagtcccccgagaaaccctgtcaatcgaagcgatagatatccatccccaacgagcccagggtaaagccgctgtgctcgacgcgcatcccgccgccgcccgcgccgcgggcgaagaacagtggcagcaggtgctcgtcgctggggtggttgcgcgccgcccagggcgcctgccggcggtagtcgtgaagcgcggcctcgtcgtcggcctggagcttttccaccatccagtcacggaactcccgcgcccagggcgcgatggcttccggcccggcgcgccagtccagttcgcccaggttgtgggtgatgctgccggaaccgatcagcagcacgccttccccgcgcagttggcgcagggcctggccgacgcggctctgcagggccggaccgaggcggctcggcagggacagctggagcaccgggatgtccgcctgcgggtacatcaggctcagcggcacccaggtgccgtggtcgaatggtcgctgtgggtcggcctgggccggcaggccggcggcctggagcagttcgatcgtccgctgtgccagcgccggctcgcctttggccgggtagcgcacggcgtagaggggcggcggaaagccgtagaagtcgtgccagatatccggcaccgcggcgccggttacccgcaggtcgtcgctttcccagtgcgcggaaaccaccaggatcgccttcggccgcggcagctctgtagccaggcggcgcagttgtacgccgctggcgcccggttcgagggcgagcatcggtgagccgtgggaaatatagagagtcggtagcatgattcacctcgtgactcggatgagccatgttcctccctcgatcaatcgaaaaccagtatatgtttttgaggatacctatcgacccaggcgttaggtcgcggtctcgcgcgctacgccggttgggctttccgcccagtagcgccgatcgtcgaggatcgcccggtcacgctcgaacgccaggggcaggcgttccctgaggaagtccacccaggtgcggatcttggcgtccaggtagcgcctcgaggagtacagcacgaacacctcgcggacatgcagtcgatggcccggcagtagccgcaacaggctgccttcctgcagcgcgcgggcggcgactaagccgggcagcaggcagacgccgagcccggccgcggcggcggcggcggcgcaggcggcctcgggaaggttgaccttgagcgcctcgtcgagatcgagcagcgtttcgccgcgttcgccgacgaaggcccagccctgcgggcaggacggcgcggccacgttcaggcagcgatgccgcagcaggtcctccggcgtgcgtggcacgccatgccgtgccaggtattccggcgcggcacagaccacgctgaacacctggccgagatcgcgggcgaccagggtcgagtccggcaaggttcggccgagggtgatcagcacgtccaggccttcctcgagcagggccggggtgccctgggccagcgtgaggtcgacggagacgtccggatggccgtccaggtagtccaccagtagcggcatcaggtgctcgaggcccagttcggtcaccgcgtggaggcgcaggcgaccgctggcgtgggactggctgtcttcgacgtccgccgcggcggcggcgaccgtgcgcaggatctgcttgcaatgctcgtagtagcgcagaccgctttccgtcaccacgacgctgcgcgtattgcgttgcagcaggcgcgccgagagcgcctgttcgagcccggcgacctggcgcgaaacggtcgccggagaggtccccagcgcctgggcggcctgggtgaagctgccgtgctccaccacgcggacgaaggtccggataccttgcagcaggtccatttccaactccttcgccggtccgcgcccggcgccgtctcagcccgacgccgggtcggacgttgggctccagccgccgcccagcgccttgtagaggttgaccagggtcagcgacaccgcttcgtcgctggcgacctgctgttcctggttgtccagcagttgccgctggctgtcgagcacgctgaggaagtccaccgcgccggcgcggtattgctcgcgggcgctctgcagggcgcggcggttctgcgccacggcttcgccgaggcgctcctggcggcgctggttggcggcgtagtcgtgcatcgcgtcgtcgacttcctgccaggcacgcagcacggtgcgctggtagtcgatggcggcttcctgctgctgtgcctcacgtagctccaggagtccgcgcaggcgtccgccttcgaagatcggcaggctgaacgccgggccgatggcgaactggcgatggtcccagtcgcccaggctggacagttgcagggattcgaaaccgaagttgccgttgagcgtgatgcgcggatagaagtccgccttggccacgccgatgctggcggtagccgcgtgcaggcgcgcttcggcacggcggatgtcggggcggcgctgggccagttcggacggcaggccgaccggcacgctgcccggcggacgcggaatcgcccgcgccgggccgagttcggcgagcaggctgccggggctggcgccgaccaggtagccgagggcgttgaccaggtgcgcctggttcttttccacctcgggcaggcgtgcctccatgctggccacctgggccagcgcctgggctacctcgaggtcggtagcgacgccgttggccaggcgcgtgcgggtgagttccaggctgcgccgtgcggtctcgaggttgtcgcggatgatcgccgcacggttctgttcgccacgcaactggatatagtcgcgcgcggcttccgccagcaccgagacctgcacgtcgcgcagttcgttctcgctggcttccaccgtcgcgtcggcggcttccagctcgcgtcgcacgcggccccagaagtccagctcccaggaggcgtcgaagccggccagggcgtggttgtagttgcctttgccggccttgccggagggatcgaacaggccggcgctggtggtccgctggcgctggtaggtgccgctggcgtccaccgagggcagggcgtcaccgccgaggctgcgacggatcgcgcggctctgctgcaggcgcgccgcggcgctgcgcaggtcgaggttggcacgctggacccgttgcagcagggcgttcaattgcgcgtcgtcgaacagcgtccaccattgggctgcgagcggcgcggcggtgaggtggctggggttgccggcagcggcctggagcgaccattcgccgggcgcagggcggtccgggcgggtgaagtcggggccgaggctgcaggcgccgagcgccaggctggcaataagcaggagcggagtgcctttcattgctgggcaacctcggcggagcgggtgccggtcgcggtgtcgatccgtgcttccaccgacatgcccacacgcaacttgcccgccatggcctggcgcggctcgagaacgatcttcaccgggatccgctggaccaccttggtgaagttgccggtggcgttgtccggggcgatcggcgcgaagctcaggccggtggccggtgcgatgctgtcgacatggccgcgcagaaccttgtcggggaaggtgtcgacgcggatttccacggcctgtccgggagagacgtgggtcagttgggtttcctggaaattgccgaccacgtaggcctgctgcaggggcaccaccgccagcagcgcgctgcccggcgtgacataggcgccgacgcgcagttggcggcggccgacctggccgtcgaagggggcgcggagttcgcagtaggagaggtccaggcgggcctggtcgcgtcgcgcctgcatgcgttgcaggtcgccacgggcctggccgacgcgggcttcgaggacgctcacctgcttgcgcgtggcatccaccgcggcctggccctcggccagccgggcgctggcggtatcgatccgcgattgcgcctgctgggcgttctgcaggctgccggcgcccttgctggcgagggtctggtagcggctttgctcgtgacgggcgaagaccagctcggcctgctcggcgcggaccttggcccgcgcctgttcgatcagcgcctgctggcgttgcaggttggcctcggcattggccaggttggcctcggcaccgagcacgtcggcttcggcggcggccagggcggtgcggaagtcgcggtcgtcgaggcgggcgagcaactggccggccttgaccggctggttgtcctcgaccagaacgtcctggacgaagccggcgactttcggcgcgaccagggtgaaatcggcgtgcacataggcgtcgtcggtgctctgcacgacccgtggggcgagcaggtggaacagcaggtagaccagtagggtcaggaccagcagggcggcgagcagcaggctgcccttgcgcgaagtgatgaacgacatacagcgacctttcagtgtgtgggagcgaccgggcggggcgggtaggcccgttgcggcaggatcggaatcaggatcagcagggcgcaggccaggccggccattgccagcagcacgtcggcgttgcccagcacctgggcctgttggcgggcctgttcggccaggtgctgccagtgcgcgccggagtcggcgcccggttgcaggccggcgatctgttgcaggcgcagttcgacggcctggggcgcattgcccaggtgatccaccaggcggttggagtggtagtgctcgcgggcggtgccgagggcgccgatcaccgcggtggcgactaccccggagaagccgcggacggtgttgaaccaggccgaggcgaagggtccctcgatgggcgcgatgacgctggtggagagcatcagcagcggaatcaccgccatcggctggccgaccaccagtaacagcatcggcaggtagaagtcctcgcgcacccagtccgccgtcagttggctgaagctcaggcaggcaccggcgcacaggcacaggccgcaggccagcacccagcggcagtcgacccgcgggatgttgcagagggccgccaccagcggcagcgcgacgagctgcggaagggccaccagcaacaccatgggtacgctctgcagggggcggtagccgcggatctcggcgaggaattcggtcggcacgcccatgctcgcgccgagcaccaccagcacgccggccagggtgatcagggcgaaggtcaggttgcggcgcttcagcaactgcaggcggaagaacggcagcgggtggctccattcgttgaccaggaacagccccagcaggaggctgccgctgcccagcagcaggcagatcagcggcgactcgaaccagtccaggcgttcgccttgcagcagaccgatcaccagggcgcagatcgccgggaagccggtgagcaggccgatgccgtcgaactggcggaagcgttccaggcgcaccgggtcctgggggatgccatgggacaccgcggccatcgccaccaggcacagtggaatgacctgccagaacacccactgccagccgacgtattcgaaccagaacgccgccagtggcaggcccaggttgggcccgaaggtcgcggtgagggcataggcgcccaggccatagagctttatcccgggtggcaggaagcgtagcgccacggtcatcagcattggcggcaggcagccggccatcagcccttgcagggtgcgcaggaccagcaggctctcgaggttcggcgcgaacggacagagcagggccagcagggcgaagccgccgatggcgaagagcgtgaagcggcgcagggaaaaggtcaccgaacaccagggcgcgaatgccatggcggcgacctgggtggcttcgtagagcacggtcagccaggtgccttcgtcatggccaatggcgagtgcgccgcgcacatcggtcatggcgatctcggtgacatgaccattgagaccggcggtgagcgaggcgagcagcacgccgagcaggcctaccacgatgcgcgtgccgaaaggctgggcggcgggggctgcggttggcgtcggctggccgagcggggtggcgagcgaagtcatcgcgacctcgctacggcgagggtggggaaacaaggcatgggcggaaactcttctgatttccgccgcagtctaggagcgtcccggtagtgtgaaaattgaaatgatcgaaatgaatcagtgcattttgtgcatctgtttcagttggagccaagcagcggatggggatcgctctgcacttcctcgcaaatccgcttgatcgtttgccggaaccagcggtgcgcgggatcgttgtcgaagcgtggatgccaggcctggaccaccatcacggtcttcaacggcaccgggatgtcgaactggcgcaggcccaggcccagtcggttggcccgccacagggaatgctcggcgatcggcagcagcaggtcggagccgggcagggcgaagatcgccgagtggaaggtcgggctgatcagcttgacgtcgcgcttcaggccgagttctcccagggcctggtccagcggtccatggttgaggccacgacgcgagacggcgatatgcggaaaagcgacgaagcgctgcggagtgatctcgccgtcgaagatcgggtgcccctggcgggccaggccgacgaagcgggtggtgagcaactgctgggtcttgacctcgggttccatccaggacgaggcgccgatatagaggtcgatgcggttctgccgcagtgcctcgtcgtcgatgtccgactcctgcacgaagcgcagggtgcagcgcggcgcctcctcggcgaagatctccagcaggcgtatcgacagaccgccgaccagggtgttgttggaacgcagggtgaagcagcgctccagcttgtccagttggatggtctcgcgagtgttgaacaggtcgcgggcctggtccaccagttgccggacctgctcctgcagttccagggcacggggcgtgggcaccagcttgcggccggcgcggaccatgatcgggtcgcctaccgcctcgcggatccgtgacagggtacggctcatcgccggtgggctgaggtgcatgcggcgcgcggctccgaccacgctgccctcttcgagaagaacgttgagggcgaccaggagattcagatcgggaagatgcatggagtggaagtataagcacgctggcatgcgcagggtgcagtctttcgttctcccaggcgtgcgttcgctgcattgctggattgcgttcgcggtgcctttacgcgcaccggtggctgccgaagaatgccggtgcacgctctatccgaggatttgccgatgttccatacgctcctggtcgccatcgacggcggcccgcagacccgtcgcattgccgagctggcgcggcaggccgccgcgccgggcgcgcgggtccacctgctgtgcgcggtggacgccggctatgcgttgccgggccggccgacgctgctcgactatccgcccgccgcgcacgagtgcgaagaggcccggcaggtcctcaacgaggcccgtgcgctgctagccgggtgcgagctggaggtacgggccgagctgcgcgccggcgacccggtgcaggtgatcctgggcgaggcgcgacgcctgggctgcgagctgatcgtcatcggtcatcggcacctggggcggctggagcgcctgctcgatccttcggtcggcgaccgggtgatccgcgaggcgccgtgtccggtgctggtggaagtgcgcgaggaagatgcgcaggggagttgacctgccggccgattgtcgccaccttgcggtttttcccacgaatgcggagggcaggatgcaggcggatttttggcacgcccgctgggcgaacaaccagatcggcttccacctggacgagatcaatccctacctgatgcgccacctgtcgcggctgcgactgcaagcgggcgaacggatcctggtgccgttgtgcggcaagaccctggacctggcctggctggccacccagggactggaggtgctgggggtggagctttcggaaaaggccgtgagcgacttcttcgaggagcacgacctgcgccccgagatcgatcaactggatggtttccgccgctaccgggtcgccggcatcaccctgctgcagggtgatttcttcgccttgcaggcagagcacctggcgcagtgcagggcgttctacgaccgtgccgcgctgatcgccctgccgccggagatgcgcgagcgctatgccgggcatctccaggcggtcctgccgacgcgcagcctcggcttgctggtcaccatcgactacccgcaggcggagatggccggtccgccgttcgccgtgcccgacgaggaggtgcgtggctactacgctggcggttggcggatcgaggaacttgagcgcggcgacgtgctcggcgtcaactggaaattcctcgagcgcggggtgtcctggctggacgaggccgtctacctgctggagagaggctgaaacggggcgccgcgcggcgccccgtccattttcagcggagttcgtcgaccagcaccgcaagggtgctcaggacgtcctggccgagccgcttggagcgggcgccggaccagccggtcccgggctccgggttgtcgtcgtggtccttgaacggcatctcgatggtgaacgccaggcagtcgtaggtctgcccgacgaagttgcaggccagcgccaggttggcctggcccggcgcactgcgtgggtagccatggcggatctggaattcgccgcgcgccatcagttcctcgcggaagcgttgctcgagccgttccaggcggggcgtatagcccgggttgccctcgcagccggcggcgaatacgtgggggatttcctcgtcgccgtggatgtcgaggaacaggtcgacgccatggcgcttcatctcctgctggacgaaccagacttccgggctgcgctcggcgctcggctccagccaggcccggttgagatcctggccggcggcgttggtgcgcaggttgccgtggaacgcgccgtccgggttcatgttcggcaccaggtacaggtcggccttttccagcaggcgctgcatttccgtatcgtccggccgctgcaggcgctcgatcaggccttccatgaaccattcggccatgtgttcgccgggatgctgctgggcgatgacccacagcttcaggtggctgtcgggatggcgcctgacccgcagcaattcgatgtcgcggccttgcacgctggtgccgacggcgagccgttcgacgccctcgatgccgagcgcacgttcgaccaggcgggcatgccgttcgcggctgtagggctcgaagtaggcgaagcggacttcgctttcctccggttccagctggaaatgcaggccgtcggcgtcgtattgcgacggcacgcggaaccagcgttcgccatcgtacgaggcgactgcctggtagccgctccaggcatggctgtaggccgactggccggcgttgaccagggtgaagcagtgctcggtggcggcagccatgccctcgaccttgaagtggaaccactggaaatgctggctggccaggtcgggacggatcgccaggcggatccggcggggatcgctggcatcgatgacctggatgttgccgctgtcgaaatcggcgcggatctgcatgggaacctcatcgggcgaaatcacggacccgcatgttccggggctggctcgcggctgtcaaagcgaccatggataggtggctttcccgggcataaaaaaagggcgaccgatggtcgccctgtcccaagtgtgaaagcggatcagcgtgcgctggcgcgcagcgcttcgatacgatcctccagcggcgggtggctcatcagcaggccggccaggccgtgcttgaggccgccattgatgccgaaggcgttcagggtgtcgggcatctgcaccggcacgccctgttccgaacgcaggcgttgcagcgcggcgatcatcgcgccggtgccggccaggtgggcgccggcggcgtcggcgcggaactcgcggcggcgcgagaaccacatgacgatgatgctggcgaggatgccgagcaccagttcggcgaagatggtcgcgacgaagtagccgatgcccgggccgtcctcgttcttcaggatggccttgtcgacgaagttgccgaagatccgcgcgaagaacatcacgaaggtgttcaccacgccctggatcaatgccagggtgaccatgtcgccgttggcgacgtgaccgatctcgtgggcgaggacggctttcacctcatcgggcgagaaacgttcgagcaggccctggctgaccgcgaccagcgcgtcgttcttgttccagccggtggcgaaggcgttggcctcgtaggcggggaagatgccgacctccggcatcttgatgccggcttcgcgggacagctcttcgacggtttgcagcagccactgttcgtgacgggtgcgcggctggctgatgacttcggtaccggtgctcatcttcgccatccacttggagatgaacagcgagaccagcgaaccggcgaaaccgaacacggcgcagaagaccagcaggctgccgtaattctggccggtgaagcggtccaccccgagcagtttcagggtgatgctggcaatcaccaggactgccaggttggtggccaggaacaacaggatgcgcatcatggtgtaaagcttctcctcacggctgaaggcacggagcgcggttcgcaggccgccggggcgggcgaacgggctcctgataatcatgcggggttatataaggggcggtccatggcgattcaatcgagggactatttcaaactgtgtcgccttgcgcgcccaggttgccctcgaacagcaggcgggtcagcccggccaggcgttcgccgtcgccctgcgccagcgcctggcgcaactggttggccaggctggcctgttcgcggcgcacgctggccggcgcctcggccagcgccgccgcggcccgggggacgatacgggtaagtcttaggaaggccttttcgctgagcaccgcctggtcgagagcctcgtaatgaatggtgttggcgaagcgcaggtagccttcctcggcgagccagagcaacgcgcccagacaactttggtgacgtttgctcggcaggccgaactcgtccggcgcctcgcggccgatcaggtcttcgacgtagagcgcggtcttgcgcggaaacgcctggtagagaagcaggaggccgccagcggcgtccttgtggaagtcgtcgatctgcaggtccatggatgggtcgccgggcagggcggcgccagcggcgccgcgggagcggggaggttactgctggtagcccttgaggaagctgccgatgcgcaggatcgcctgctccaggtcatcgacgcggggcagggtgaccacccggaagtggtcgggccacggccagttgaaggcggtgccctggacgatcagcagtttttccgagagcagcaggtcgaggacgaacttttcgtcgttgtggatcgggcagaccttcgggtcgatccgcgggaaggcgtacagcgcgcccatcggcttcacgcagctgacgccggggatgtcgttgagcagttcccaggcgcggttgcgctgctccagcaggcgccccggcggcaggaccagatcgttgatgctctggtagccgcccagggcggtctggatcgcgtgctgcgccgggacgttggcgcacagacgcatgttggcgaggatgtcgagaccttcgatatagctctgtgcccgctgcttgggtccggagatcgccacccagccggagcggaagccggccacccggtaggatttggacaggccgttgaaggtcaggcagagcacgtccggcgccagcgaggcggtggagacgtggacggcgccgtcgtagaggatcttgtcgtagatctcgtcggagaacagcaccaggttgtgctggcgggccagctcaaccatgccttccagcacttccctggaatacaccgcaccggtggggttgttcgggttgatgatcaccatcgccctggtgttcggcgtgatcttcgccttgatgtcttccaggtccggccaccagttggcctgctcgtcgcacaggtagtgcaccggcttgccgccggcgaggctgaccgcggcggtccacagcgggtagtcgggagcggggatcagcacctcgtcgccgttgttcagcagcgcctgcatggacatcacgatcagttccgacacgccgttgccgaggtagatgtcctcgatgccgacgccctccacctgcttctgctggtaatactgcatcactgccttgcgcgcgctgaacagacccttggagtcgctgtagccctgggcggtcggcaggttgcggatgacgtcctggaggatttcctcgggagcttcgaaaccgaacggcgccgggttgccgatattcagcttgaggatgcgatgaccctcttcctctaggcgtttggcgtgcttgagcaccggcccgcgaatgtcatagcagacgttggcgagcttgttcgatttgctgacctgcatgatgtgtcgagtcccgaagtgagcgaacaccgtggaacaggctgcgaaaagcccgctggatcgcggcttggcaggctgtaacgcggatgacagactggcgtctataaggagcacgcatgatacgtgcggcccgtcccccggaaaagggagcgccgggcatttttcagatcgcgaggtagagccgatgagcaagatcgacaaacccctggactcctggcgcgaggagttgaccgaagagcagttccacatctgtcgcctgggcggtaccgaacgcgccttcagtggcgaataccacgccaccaagacccccgggatctatcattgcacctgctgcggcacggcgttgttcgactccgacgccaagtacgactccggcagcggttggccgagctatttccagccggtggacgccgaggcggtccgcgaactggacgacttcagccacggcatgcatcgcatcgaagtccgctgcggccgctgcgatgcccacctggggcacgtcttcccggatggcccccggcccaccgggttgcgttactgcatcaactcggcctcgctgaagctggtgccgcgggagagctagagagcgacgacccgtctttggttcgggtcgtttttccttcaatcaatttgtgtgcaattgaattgcgagctactttgtttcgagacccaccctcaacaaggaagacaagccatgagcgattcgctgctgagcattccctgcaccaccatcaagggcgaacagaagaccctggccgacttcggcggcaaggcgctgctggtggtgaacaccgccagcaagtgcggcttcaccccgcagtaccaggggctggaggccttgtgggaaaaataccgtgagcgcggactggtggtgctcggtttcccctgcaaccagttcggcaagcaggaaccgggcgacgagggcgagatttcgcagttctgcgaactgaactacggggtgagcttcccgctgttcaggaagatcgaggtcaacggcgccggcgcccacccgttgttcgtcagcctgaagaagcgcgcgccgggcctgctcggcagccagggcatcaagtggaacttcaccaagttcctgatcggccgcgatggccaggtggtgaagcgctatgcgccgaccaccaagccggaggagctgagctcggcgatcgaggcgctgcttgaatgagcacccggggaaaagtcgccaggccggatggcgtcgaagaatcgctgctgctcgacaaccagctgtgtttcaagctgtacgccgcctcgcgcgcggtgatccgcggctatcggccgctgctcgaacagatcggcctgacctacccgcagtacctggtcatgctggtgctctgggagtggcatgcgagcccgccggagcagccgacggtgaaggccctgggcgaccgcctgctgctcgactccggaaccctgacgcccttgctcaagcgtctcgaacagctcggcctggtggatcgccgtcgcgccagtcacgatgagcgggaagtgcacctgacgctgacggtgccggggatcaccttgcgcgaacgggtcattccgctgcgccagcagctgatctgcagcaccggtttcgacctcaacgagatgttcgacctgcaccagcgcctgggcggattgctgtcgcgcttccgtctggtggtaggaggctagccgtcgtcgcgaggccggctagtcgctcgcggtgagcgggcaccaacggtcgaggatggctttcagttcgtcgcggtggaaaggcttggccaggtagtcgtccatgccggcggcacgacaacgttcgcgctcgtccggcagggcgttggcggtcagcgcgatgatcggcaggccgccccagcgtccgctgtcgcggatctgccgggtcgcttcgtagccgtccatcaccggcatgttgcagtccatcaggaccaggtcgatgggatgctcctccagcatcttcagggcattcagcccgtgttcggcgatccatacctggcagccgagcttgtgcagcaggcccttggcgaccaactggttgaccgggttgtcctccaccagcaggacccgggtgttgcgctgttctcccgtggtgtccgaggcgctcgacggggctatggcagtgtgttcgagcacgtgtttcagggcctggtacaactggttgcgactcagcggcctggccagttggcgcagcggcgacaggcggcgggccagctccggttcgaggaaactgccgtaggcggtgaccagcaggatcggcgtaccgatgctcggacgcagtcccatcagacagtccgggcaatccgatatcagtacgtcgagcgagtggccgagcaggctgtcgtcggtctccagacgcttgtactccaggccccagcgcggcagccaggtttgcagcagctgcgccagcccgctgttggccgagcattgcgcgatcacccggccgcgcagcggcagcgcctgcagcggagggctgaccggcgccagcggcaggccgacgctgaacaggctgcccaggccgaccgtcgactccaccgtcagctcgccctgcatggcctcgcacagcttgcgcgtgagggccaggccgaggccagtgccgccgtattggcgggtgatacccgcatcggcctgggtgaacggttggaagatgcgatccagcgcctcttgggcgataccgatgccagtatcgcgcacactgatgcgcacaccctcggcggtggcttccacgcgaacgtcgacccgccccaggcgggtgaacttcagcgcgttggacagcaggttgctgacgacctggcgaatccgcgtcgggtcgccggaaacctgggcgggcagggcggggtcgaccaggcaggtcagctccacgccggccgcggcgttctgcgagaggaggctggcggtgtcttccaccaggacgcccaggtcgaacgggatctgttccaggaccagttgcccggcctcgaacttggagaggtcgagcacgtcgttgagcaattccaccagcaccttgccggagtcgtgggcgatcgacagctgctggcgctgttccggggtgagcgggccgtcgaggctcagcgagagcatgccgagcaggccgttcagcggcgtgcggatctcgtggctcatgttggccaggaagctggcgcgggcctgggccatatcgagagcggtctggcgggcttcttcgagttcctggttggatagcgtcaggcgcgcgttggcggccttcagctcggcggtacgggcggcgacgatgctttccagctcctccaggtactgggtcaggcggttctccgcctcccggcgctgttcgatctctaccgagatgcgcccgagctggcggttgatgacttccaccagcacgccgatctcgtcgcgttcgtggcccttggggcagggcaggcgcatgcgtgccggcgagcgtggatcgtgtccgctgagggcctggatcaggctgaccaggggcttggtcagcagggtatagaagagcaccagcaggatcagcgacagcagcaggctgcgcacgaagccggagagcagggtgatgccggcgcgacggaggaagtcgttgccgaacacgaaggtgtcgatttccaggtgcagtacgccgagggcctcgcccggcgcatggtcgacatgcaacgggtcctcgtagacccgcttgtggccgaagaggaagtcgctgagcggccgcaggcggctttcggcggattcgcgcgaggcgctggccagcggcaggccggaggtgtcgatgatttccgcgcggaccacggcgggcgaacggagcaggccgaggaccagctcctgggccagctccgcatcgatgttgtaggcgattcgcgcggcggggttgtggctgacgtccagcagcgcgcgcacttcgcgattgatggatgcgtcctggctggcataatcgacgccaacctgaatcaggctgagcagggttcccaggataaaggccaccagcacggtgaggctggcctgtttgaacgacaggcgatgggtcagcgctatatccatgggggcggggatcagccttggcgaggttctgccgcctagcatagcccatcccgaccgtctgtcggggttcctgggcgcaaccgatgatcgatccgtgacgtcagtccgatccgaggagaacagagtggattcccgattgagcgattttcttgcccgcgccgaaagcgtgctcgcgcgcctggagccgctgctgccggccgtacgcgaagccgtcgactgggagcgcagcctggcggcgcgctggcaccgcgacggccgtagcggctacctgcagccgctggaggtcagcctcgacctgcgcctggccgacctgctgggcgtagagcggcagcgcgagcaactggaacgcaacacccgccagttcgtcgccggccagccggccaaccacgccttgctctggggggcccgcgggaccggcaagtcctccctggttcgtgcgctgctggccgagctggccggcgccgggctgcgcctgatcgagatcgagcgcgaccacctggccgacctgccgcgcgtggtggagcaactgcaaggcctgccacagcgcttcgtgctgttctgcgacgacctctcgttcgatgccggggaaggcgactaccgggtactcaagagcgtgctcgacggctcgctggaacaggcgccggagaatgtgctgctctacgccacctccaaccgccggcacctggtttcggagaagcagagcgacaacgagaactggaagatggtggacggcgagctgcatcccaacgaagcggtggaggacaagatcgccttgtccgaccgtttcggcctgtggctgtcgttctatcccttcacccaggagcatttcctcagcgtggttcaccactgggtggacgtgctcgcggagaaggccgggctggcctggagctggagcgaggaactggagaaggaagcgatccgctgggcgcttggccgcggcaaccgcaacggccgttgcgcctatcagttctcccgctactgggtgggcaagcaactgctggagcgccaggcatgatcgatctgcagcaatctggcgccgggctggccggctacgccctgctggcggcgcaggccgaggcgctgttcgccgacgagcgcgatttcatcgccaacgccgcgcagttctccgcctttctcttccatgagctgggcgacctgaactgggccggcttctatctgaaccgcaacgaggaactggtcctgggaccgttccagggcaaggtcgcctgcgtccgcatccccttctccaagggcgtctgcggcgccgcggcgcgtacccggctgacccagcgggtcgacgacgtccacgcgtttcccggccacatcgcctgcgacagcgcttccagcagcgaactggtggtgcctctgctcaaggacggccgcctggtcgctgtgctcgatctggacagcccgagcgtgggacgcttcagcgccgaggaccaggccgggatcgaaggcctggtggagatattcctgcgcctgacggactgctgagcgacgcgttcaggctttcgctgcgagtttgtcgagggtccgtcgttcccccggcagcagcgcttgcatcgccgggcgttcgagcatccgcgcgaaatgcgcggcgagggccggccagcgttgctcgtccaggttttcgccggcgtgacgcaggttgaccaactggctggcgatcgccaggtcggcgagggtcagtcgctcgccgacgaagaaggcccggccgtcgagatggttttccaggtaatcgaagtgcgctggcagcttttcctccagcgcgcgacgcacgtcgttttcctcgcaggcctggcccatcgccggcttgagtatccggttgcggaagatcgtcagcgtggccaggggagcgatctcgtagtcggcgtatttttccagccagcgcaccgctgcgcggccggcgggggcgtcgccctggagattcggcggttcgggatagcgttcttccaggtactggcagatcacgctggagtcggcgagggccaggtcgccgtcgcgcaacgccgggatgcggcccagcggactgatctcgcgataccaggccggctggccgaacggggcgatcgcttccaactggtagtcgaggcccttttcggccaggagcaggcggaccttgcggacgaacggagacagcggggctccgtagagtgtcaggctcataacgatttcctcggtcgatatgagcctgggttatagcacggctgccgtgggcaggccggaatcagtcgtagacgttcttcttcttccacaggtcgtctgcatcgagggccttcaatccctcgttgagttcgctgggctcctcgctcgccggctggctgttgttcagcaccatcgcgttggcgcgggccagctgcgcttccatctgctgcagctccgcctggtagcgcgccagctcgggctgcttgcgcaggtactgggcgccgcgttcgaaggccaggcgcgcctggcgcggttcgttctgctgcagggcctgctggccgagattgccgaagaactcgatatgcaggcgcaccaggaggtggcgaatctccttgacccagatctgcgcctcgctgcgcggcaggtggccgtcctgggtgaaacgggtgagctgggcatgcagggcttcgaagaggaagcggacttccttggccttgtcctcggtcaggatcgcctggggcggattgcgcaccgggatcgactcgcccttggcgaccagcgcgcgcaactcttctatacgagccttgagcccggcatcggctttcttctccagcgccagttgctgctcgctgaggctgagctcgatctggctcatcaacagcttcagcgacgggctgacgaactggccgggaaggctctcggaaatctgcgcgcagcgccggacccggtcgttgagttcggccttcaggcgcgctttctccagcttgctgttttccaccacgtggttgatatagccaatggcgatgaggagggcgatcccgccgatgatgagggcggtaatgaggagtggcgacaccttgggactccgctgtaagaattttctcagtctaatgtcttggtgctaccactgatagcagcagctcattatttgcacagaagtctttgatttaaaaaaattttctcagaagggttgacgcctccccggacgctccataaaatgcgcgccacttccagcgtgaagccaaacgcgaaacactggaagccggaaagatctgttgtaagttccgggccgcgtccccttcgtctagtggcctaggacaccgccctttcacggcggtaacaggggttcgagtcccctaggggacgccattgcgggaatagctcagttggtagagcacgaccttgccaaggtcggggtcgcgagttcgagtctcgtttcccgctccaaattctacaacctagcttcggcggggttggtgaaagttaggcgtcaaaggttcggtttcggccgaacgggcaacaagttgtaacgcgggaatagctcagttggtagagcacgaccttgccaaggtcggggtcgcgagttcgagtctcgtttcccgctccaatttatgatctacagacttccactgacgtctgtaagtcattgaaaagaggagcttcggctccttttttcattccagcgaaagccacggaagtccactgacagccaccatttttgaggccaaaaacaaggccaaagaatgcgggtcgtgccggttccgggttgttgctggggttggatcgggatgacaagcagcatcgggcctaagtccaagacttaggagcttgatgatgacactctctgatctgaccgtgcggcaagccaaggccgccgagaaaacctacagcatccccgacaccgatggcctcggcctggtggtcgcccgcaccggcggcaagtcgtggcatttgcgctattactggctcggcaagcaaaagcgcatctccctggggaactaccccgagatcggtttgcgcgaagcgcgcaccttgcgcgacgaagcccgggcgcttctggcaaagggcgtcaacccccataccgatcggaaacagaagcgacacgcggtcaagcttgcggccgactacaccttcaaggccgtcttcgatgcgtgggtcgagcatcgccgcaaggaaatcaaggagggcaggaacagcacgctgtcgcaaatcctgcggatcttcaacaaggacgtgctgcctagcctcaagcagatgtcgatctacgacattcgccggccccaactcctgggcgtcctggcgaggatcgaggagcgcaaggcgttcaccactgccgagaaggtccgcacctggctggggcagttgttccgctatgccctcgtcatcgtggaggggctggaagccaatccggcctccgacctggacgtggtggccgagcccaagcccccggtgaaccacaacccctacctgcatcttccggagcttcccgagttcctgcacaagctcaggctctacaaccctcgtggttggcagacccaactcggcatccggctgctgttcctgaccggcgtgcgtaccggcgagctgcggctggcgaccccggaccagttcgatctcgaccgtggcctgtggatcatcccgccgcagatcgtcaagcaactccaagacgagatgcgcaaggccggcaagcgcccgcaggacgttccgccctacatcgtgccgttgtccgtgcaggccatcgagatcgtgcgctacctgttgggtgtgatgaggccggcccaggtccatctgctcacgcaccgcagcgaactcaagaagcgcatcagcgagaacaccctcaacgcggccttgaaacgaatgggctacgaggatcaactgaccggtcacggcatccgcggaaccatctcgacggcgctcaacgagatcggctatcccaagatttgggtggacgcgcagctttcgcactcggacccgaacaaggtgagttcggcctacaaccacgccaagtatgttgagccgcgccgccggatgatgcaggactgggcggatcgtctcgatctgctcgaacagggccaagtggaagcggccagcgcgcacctcacgatccatatcgagggcgtgccggccatggcagaggaggacaagcccaacaccatcgtcgctgctgcttctgcggcatccgttccgcctgtggtggccgaacccatcgtcgtgacgccaaacgacgggggaatcacattccagcgactgtcgcaggtaccaccgcccccgacgcatgcgccagagccggaggtgtctgtcatccagcgcgagcgcgaggaaatgctggtcatctacgaatcgccgagcagtctgccggtcccgctgttcggcaagttggccgggaagtccaaggaccagatcaaccgcgagctgaaggcgggcaagctgctgtccatcagcttgggcaaccgcgggcaacgcgtgcccgactggcagctggtacccctcaagcacaagctggcacaggtgctcatgaaccagtgcccgcatgcggatccgtgggacctgtaccggatgctgacccgcccacatccggacctgggtgatcgcgcagccatcgacatcgtgacaccaggaaatttgggcatggtcgtgcgggtcatcgcgggcacccagcagcagccaaacaggcccggacctgactcgtctgtgcaaggtattccagaggagactcgccagcgcattcaacggttgctaaatgatgcggcaatgctcgaaagtgcctgacgctgttggcgcgcatccagaactgacccactttcggcggtgatgcgcgggtaaaactgacccacctgaagcccacatcctgagcatcttttgctcgggggatttcaggagtgatcaccatggtcatgttggccaagatccggcggatgcatttccgcgatggcctgccgctgcgcgagatcgccaagcgcacgggcctatcccgcaataccatccggcgatggctgcgcagcggccagtccgagccggtctatcccaggcgagcctcgccctcccggctcgatccctaccggtcccagttggagacgtggctgcgtgccgacagccatcgtccccggcgggaacaacgcaccgccaaggtgctgttctcgcagttgcaggcgatcggctatccgggcacctacacccgggtgacggccttcatccgccagtggaaggcggccggcggcgccagccgccgcccggccttcgtgccgttgcactttcctccgggtgaagccttccagttcgactggagccgcgagtacgccttcgtcggcagccacgccaagatgccgctggatctcgcccacgtgaagctggcctgcagccgcgccttctggttggtggcctatcccacccagagccacgagatgctgttcgatgctcatacccaggcgtttaccgccttcggtggcgtgccgcgccgcggcatctacgacaacatgaagacggcggtggacgggatcggccagcaccgggaacggcgggtcaacgcccgcttccacgccatgaccagccactacctgttcgccgcggagttctgcaaccgcgccgcgggttgggagaaggggcgggtcgagaagaacgtgcaggaccggcgccgacagatctggatcgaggccggggcccgccactggccagatctggacaccctcaacgcctggctcgccagcgagtgccgcgccgcttggccgatgcaggcgcatccggatgcctccgacatcaccgtggccgaagctctggaggacgaacagccccacctgatgccgatgcccgcgcccttcgacggctacatcgagcggccggtgcgggtcagttcgaccgcgctggtcagcttccagcgcaaccgctacagcgtgccgtgcgaacacgcccacgccgtcgccagcctgcgcgtgtatcccttcgaactggccgtggtggtcggcgaggccgaggtcgcccgccaccggcgcagcttcgagcgtgatcgggtccactacgactggcagcactacatcgccctggtccagcgcaagccgggggcactgcgtgacggcgcgccgttcctgtccatgcccgatccgctgcgcaagctgcagcaggtgttgctgcgccagcctcacggcgaccgcgccatggcccaggtgctggccgccgtacccgtgcacgggctcgaagcggtactggtggcggtggaactggcactcgagtccggcctggtgcgcgccgaccacgtgctcaacgtgctggggcgattgcagcatccggaccgcacgatcgagacggtcgcctcgcgagtgacgctgcgtcatccgccggtgtccgatccggcccgctacgacgccctgcgggaggcagatcatgtcgacgcctgacctgccgctgcgcatgcagcagctcaagctgcacggcatggccagccagtggcccgaactgctggccaagatgcgcctgcacaccatggagcccgaacactggatggccgaactgctgcaggccgagtccgccgaacggcaggttcgtgcccaggccaaccagatgaaggccgcacgtttccccgtccatcgtgacctgctcgggttcgacttcgcggccagtcccgttgatcgcgcactggtcgaacgactccaccagggtgacttcatccacacccccgagaacgtcgtccttgtcggtggaccgggcaccggcaagacccacctggccaccgccatcggcatccaggccgtgcgccagcatcgcctgcgcgtgcgcttcttctccaccatcgaactggtcaatgcgctggagaaggaacaggcccagggcaaggccgggcagatcgccctgcgcctgacctatgccgacctggtcatcctcgatgaactgggctacctgccgttcaccccctcaggcggcgcgctgctgttccacctgatcagcaagctctacgagcgcaccagcctcgccatcaccaccaacttggccttctccgaatggggtcaggtgttcggcgacgccaagatgaccaccgcgctgctggatcgcatcacccaccactgccacatcctggagaccggcaacgactcctggcggctgcgcaacagcaccgccgccaacaagaccaaagccagaatcagggcaaaggaggccaccacccagaccaccaactgataccctcagccccgtacaccgggtgggtcaaagttcaacgcgcagcctgggtcagttttaagtgcgcgccaacagacgttggcagcgggggagccgctgaggtggccggcgcgccattgggcgacgccccatccaacggcaataccggcagcaaccagcgtcaagccggcaaggatgtttctcgaagaggtattcatggcgagggtctccactcagtccgcgatcaggctgttcagtcgggcgacgaggctgtcgcgctgcgctccaaggtcgatcagacgcatgcgcgtctccagcacctgggcgcgtgcactgagcacagcgctcaggtcccccttggcggatcggtagttgctcaatgcaagcgccgctcggttccgtaccagttgcaagccggcggtctgcaggcggtcgatctggctgttcaacgcttggagttcggcggcgctgtcgtccagctcctgcaaatgccgccgcgccacgtcttcgcgttcggcgtccagacgttccaactcgtgccgttttgcctcgatcatgggcacttggcgtcgatccttctgccaaggcagatcgaatgtcacctgaaatgacaccatgtcgccccatcggcgatcacgccggctataggctatctcccaggcccaatcgccgcgggtctctgattgggcttcgcgggactcggcccgggccatgctttgcatcgccggatagagttcaagctccgcgtgattcgccagttctgtgcgcagttgcgcgacggggcgagtgagcgggcctggatcgccttgcagtgcttcgtcggccctggagcccacccagcgccgcaacgcggccctggccttggcccggtcccgctgtagatcgtcacggcggtccgtgagtgtcagcgcctcctgttccgcgaccaacagatcgccagcctgggcggtgccgccggcgacgcgagcggggagactgtcttgcaggcgctggttctccgcgagcagttccgtcagcagtatctcccgttgctccaccgcctgcgcggcgatccacgccaggctgagttcctggcggatctgcaatcgctgcaaaaccagcgccgcgcgttctcgatccacacgcgcctgcgcgctggcgacctgggcgtcgcgcttggccctgttgggcacttcctgcatgagcgccaagcgctgcatcgtcatggattcgcgcgtcatgctccagcgatccatgccgctgatggggtagttttcgatgccgagcgagagcttggggtcgggcagcgagcctgctgccttctgcacggattcggcgacgttaacctgcaactgctgcgcgcttatgcgtgggctctgctgctccgcgataaggcgtgcctcagcaaaatcgagggcgtaggctacaggcgagacaagcgcactgcccgccaacgcgatgctgatagctttcagacgatgcactcgcatcgaggccggcgttgtgcctcggccgtacgccgacgggcgcccctcgggggcgccaaaaaagggagtaaacatggttgtcctcggaattggtattcacgaaatcacgtggtctgccgcatcggtgcgcggcgagcacggacacataaatcaattccgcaggacttggaacgtgaggtagatcggcggaaagcccgcgcggggattgggaggaatgtaggtaacgtgccgcctgagaacgtgttcaaagtctcgccctcttgatgtgagaagctcgctgggtgagaaaaggctaccccagcgacatcaagcgcgagcagttcgaggtgatccggccattgctggagagtgcgcgcagaaagactgccccacgcaaagtggagctgtacgaggtgttctgcgccgtgctgtacctgctgcgcacgggctgtcagtggcgggcactgcccagcgactttcccaaatggcgcaccgtgcactcgtactttgccatctggagcgagccacgcgagggtggcagcctgctggagcaggcattaaaaaaatcaggttggcgcggcccgcgagaaactggggcgcaacgcctgcagcacgctcttgatcgtggacgcgcagagcgtgaagaacacggacacggcgggcttgaagggctatgacgcaggcaagaaggtctcgggcatcaagcgccacatcgcggtggacacccagggattgccgcatgcgatagcggtgaccacggccgaggtgacggaccgcaaaggcgcactgcaggcgctacagcgctgcaagccccggttgagccggctacaaagcctgctgtgcgatgcaggctacatcggtcggccgttcgcgcaaggcgtgcagcagattctgggagggcatgtgacggtgcagatcgccaagagaagcgagcttcacactttcaaagtgatgcccaagcgctgggtcgtggaacgcagctttgcctggctggacaagaacaggaggctgtggaagaactgcgagcgatggctcaacaccagcctgcagttcgtccacttggcattcttggtgctcttgctcaaaagactttgaacacgctctgagggctacccggtcgagaaccaacccgggcagcgagttggcgagccacatcacgtgcgccgcgagaaactgaatgtccagcccctgccatgaaagcgccgactcccgatcgccactgcaatgagcgtggcacaactgtggcgcttcgctgtccatggaatcaggcatgccggtgcaatccgacattggcaacttgtcagcctgctgcatcgagatcgtggcacgcatttgcgtggtttccacagatgccctcgggtctggcttgggacagacgtacatcgccatcgcaacctgcgagaaaagcaaggttacgactaggccgctggtaatccagcggctccatcttgcgagaaggcgccttaagccgatcatgcggacatactattggaagttgtagggagttgaattgatcaaggtcagtttccaggatgaattgatgcgtctggacggcgccttggcccgaaccggcacccgctgcaaatccaccggcaagggcgggtgacctgccccccgatttcagtaccacgtcaaacttagtagagtccgttttccgagcaggagacggcagtgaaaaagcgttttaccgaagagcagattctcgacttcctcaagcaggcggaggccggtgtgccggtgaaggaactgtgtcgccgacacggcttcagtgatgcctcgttctacagctggcgggccaagtttggcggtatgaccgtggcggacgccaaacggttgaaggatcttgaactggaaaacagccgattgaagaagttgctcgccgaggcccacctcgacatcgagtcgctgaaagtggtcgcccggggaaaagggtaagcccgacagcacggcgggaggcggtgcaggagatgcaggcgcgaactggcatctccgagcgtcgtgcctgtcagttgatcgggctgtcccgctcggtgttgcgctaccagccgcgagccagtgtgcaaaacaccgagctgcaagcccaactggtggaactggcccaagagcgccggcgctttggctatcgccgcctgcacatcctgctgcgacgtgctggcgtgcaggtcaaccacaagcggatctatcgcctgtaccgcgctgccggcttgatggtgaaacggcggcggcgccgccatggcgtcgcggtggagcgcgaacgtctgagtttgccgagcgcaccaaaccaggtctggtcgatggacttcgtcttcgatgcactgagcaccgggcggcggatcaaatgcctgacggtggtcgatgacttcaccaaggagtcggtcggcatcctggtggagcacggtatcagcggctttcgcgtcacacgggcgctggacgagatggcgcggtttcgcggctacccgaaagcgatccgcaccgaccaggggcccgagttcaccggcaaggcattcgatcaatgggcctatcagcgcgacatcaagctgaagctgattcagcctggtaagcccacgcagaatgccttcatcgagtcgttcaacggtaagttccgggacgaatgcctcaatgagcactggttctgttcgctggccgaagcgagaatccgcatcgcggcctggcggcgggattacaacgaacaccgaccgcacagcgcgattggcaatctcaccccagcagaatttgctgcaagttggcgaactcgccagcagcagctgaagcaggaaaaattaatatcaaccccagggcctactaactaggcagcggtactaaaactgggggcaggtcattctggccgaagcagataggttgtgattaccgccgtgtcctgcgccagagggcgaatcaccacgtccggcctctggctgatgggaatcttggtcgccgtcatgaaaccaatcccatagcctgcgccgacgagcgttagcatcatgtccagcgacgacacttcttcgacaacgttgagtctgtgttccagaacctgtagcagccgatttagttctcggcagtagccttcgcaggccagtttgtcgcacagaaccagtgggtgaccctgaagttcgttcagcggaacttgcttgtgcgcaagaagcgagtgccgcgctggcatggcgatcacaatcgggtctcgccagatcggttcagccacgatgccttcgccaacatccgccgcgtgtgcaaatccgatcgtgaagtcgccagaccgtaggccccgtatctgctcggtcagcggtacctcggagagacgtatctcgacctcgggctcttccgcgcggcaacgagctaggaacgccgatagtcgtgggtccatcgcaccatcggaaattgcaatgcgcaggctgcccctcaggcccgcggcaatggctctggcattttcacgcgcttgctccaggacagtgaagagtcggcgggtgtcctgcaagaatgccgcccccgccacggtcagccgtgtgcccctgcggtcgcggtcaaacagcgtgaccccaagctcatcttccaattccttgatcgcgcgagacaaggggggttgctctatatgcagcctctcggccgcccgcgtgaaatgcaactcctctgccaagacgacaaagcatcgtagatgacgcaactccataaatcgggctcctcgcaagtcctcattcgcgccagatgtcccgtggacgaatcacggtggacggggaggctggatccatttcagggaagttgatgcgcttgacatcgcaaaaactggcaccttgagcgctcgtggttgctcgtgacgcgtcccaagcgcgcgcgcccaatcggggcgcgcgtctctgtcacactgtgcagaagctttgaaaagcaccgcacacccgcggcgtcatccgccgtgctctttttgtagcagcgacccgaggcgagcgacttcattgctggtgatcgcgatgttgcgcccatccttcgtcgacaccgaagctccgacattgagatagacggcgcgcccgaagcggctttcctgtgccatctttccgtccttgaagatgtacagcgttcccccgtcagccaagggaaccatttccttggctgcttgggctgctgcatgaccggcgaaggctggcacggagagagcgctcaacagggcggcaatgacaatttgcgatttcatgatcgactcctttgtaaaaacgacgacaacttgcgccgcgtcgttaaatgtagaagcaggcggtctacagagcgcttacccgtgcattacattcaattcatgtgctgtcatctgccgcccatgaaggactaggttccagtgggagacaagatgccaagccatgcaacgctcgccagaaccaaaacggccaaggtcgcctccgtgaacagactctgtctaagcttgatgactgcctgtgcgcgattgcctgccttcaaagcagcctccaggctcgggctcaaccgataccgattggcagcagccaacgccagcatgcctgcgaaaagcaagagctttaccatcagcagccggccatacagcgtcgagatgagcggatcaaacgatggtccggcgatcaacaggtaattgagaattccactcacgacgagtgcagccacgatcgctgtacctatgcgagtaaagccattcgacgtccgactgaggaccgctaccgggtcttgcgcgacatcctgcttgtgggatgccagcatcaagaacgccaccaatgcgcccacccaagcgcccgctgcccagaggtgcgtgatatccgacgcaagatggatgtagccgcgaacgccgtcgtccatcgcgccgtggcctgcccacgcaagggtcgccagcgccacgccggtggagagcgccatcactgcaaatcgcaaggtagcgttcaatttcaacattgcgacgagcacacacaccaacagcgcgaggatgcgaatgcaccaggcgatgcccatgtgcgtgcccgtaatgagcatgtcgaagacgtgcgttgacagctccgcgtagctctgggcaccggacatggccttggccatgaccgtcatgccccacatcgacagggcaatgccgatggcagcggatgcgccaatgaggacgcgatagcggcgcgagatcgtcgaggatcgctcgtcgttgcccaaagcatagagaccgaacatggcgacgccaaacgccgccgccaggtccagatacagcgccaggcgcaggacgatggtcaaccaatccccggccatgggcttacttcaccttgaaggtgacgttacccgtgatcggatgcgtgtccgaggagacggcacgccattcgacgcgatagtcaccgggctggagcgcctgtgccggcgtgatgaccatggtcttgccgtcgccggcagccgcgacgctggcgttgatcttcatcgggccatggctcgccattcccggcatgccagtcatgacaaggctcgcggcggagaactgcggcaccagcgtctcggagaacttcagttcgatggtggctggcgcagaaacctgcgacttgtcggccggcgttgaagacaccagcgaaggatgcgcgaatgcggcggtggcgaacagaccagcagcgatcggcgcgacgagcttggcgatgaaatgtgaacgggtcatagaagtttctacctggatgtgtgaggtgtggtttaagaacgaaatgccgagataaggcttgcacctttgcaacggcgtggaacgaaagaaacggtttgctgggcgatagcaggctcctgtagtttcagaaagaaaatccggtcacagtcggctcgctctcaggcgcaaggcgttgccaacgaccgacgccgaactcaggctcatcgccaatgctgcgatcagcggcgacagcagccagcccgtgaggggatagagaaccccggcggcgatggggatgcccagcgcgttgtagaggaaggcgaacatgaggttctgcttcatgttgcgcacggtactcaccgagagcgtgcgagcgacagcgatgccacgcaggtcacccttgaccagcgtgacctgggcgctgttcatcgccacgtcggttcccgttcccatggcgatgcccacgtctgccttcgccaaggccggcgcgtcgttgatgccgtctccggccatggcgacgatgcgtccttctttctgcagtcgctcgatcaacatgagcttgtccgccggcttgacctcaccatgcacctcgtcgatgcctaggcgtgcaccgacggctttggcggtggtctgcccgtccccggtggccatgatgacccgcaggcccgcagccttcaacgcggccagggcctcgggggtgctgcccttgaccggatcggacacggcgagcaagcccgcgagctgcccgtccaccgccaggtacatgacgctggccccttcgccgcgcagagcttcggcctggggtacgagcggttccaccgatacgccagactgttccatcagcactgtgttgcccaacgccagttgccggtgctcaacctttccgcgcacgccgatgccggttcccgattcaaagctctgaggcttcacgagttggaggccctgggcacgcgcggcctgcacgatggcgtcggccagggggtgttcactgccctggtccaggctggccgcaagacgcagcacctcatcgttcgtaaagccgggggctgcgacgacctgatcgaaagcaggtcggccttcggtcagggttcctgtcttgtcgatgacgagggtatcgaccttgcgaagattctcgatcgccgcggcatcgcggaacagcacgccctgcgtggcgccacggcccgttgcgaccatgatcgacatcggcgtggccagacccagcgcgcacgggcaggcgatgatcaggacggccaccgcattgatcagtccatagacccaggtgggctgtggcccgaagaatccccatacaaggagcgtcgttaccgcaatggcgacgacggccatcacgaagtagccggcaacgacatcggccatgcgttgcatcggtgccttggaacgctgcgcctgggcgaccatctggacgatctgcgatagaacggtgtccgagccgatccgctccgaacgcatgaccagcgcgccgctggtgttgagtgtggccccgatgaccttgtcgcccacgcgcttgctgacgggcagcggttcgccggtcagcatggattcgtcaatcgagctgctgccctcgtgcacgatgccatccaccggcaccttctcgccgggtcggatgcgcagcaggtcgccgacgtgcacatggctgagtggcacgtcttcctcgctgccgtccgcattgatgcgccgcgccgtcttgggtgccagccccagcagcgacttgatggctgccgaagtctgggagcgggccttgagttccagcacctggccgagcagtgtcagcgagatgatgacggcggcggcctcgaaatacacgccgacccgtcccatggacatgaaggaagctggaaacacttccggcgcaacggttgccacaacgctgtagatgaatgccgcacccgttcccaggccgatcagtgtccacatgttcgggctgcggttgaccacggacagccagccgcgggagaagaagggccagccggcccacagcacgatcggcaacgacagcaccaactcgacccagctctgtgtagccatgtccatcaggtgcagccgctcgcccagcatcgccagcgccaagaccacgagcgtcagcggcaaggtccaccagaagcgacgcgagaagtcacgcaactccgggttgtcgtcatcgaggtcgggcagcagaggctccagcgtcatcccgcacttggggcaggttcccggatgatcctggcggatctccgggtgcatcgggcaggtgtagatggttccgggcgcggttggcgatgccgccggggccggtgaaactgcggtgctggcatggtgatgcggtgcatggccgctgcctgtgcctatgcccgcgtcaccgctggcatatcgcgccggatcggcgtcgaatttggccttgcatccggtgctgcaaaacaagtacgtgttccccaagtgcgtggaacggtgctccgacgccgccgtgaccgccatgccacacaccggatctcgcgtcgcggcatcgggctgcgtgtggcttgaggacccgcccgcgtcgtcacttccagcatggctggcgtgatggtggtgcgtatgcgggccggacgttgtggcacccgccgccatgcctgcgtgctcatgtcctgaagacttgctgggtgaattcatagtgacaagtgccctccgccgttaacctttggtgtctggtgatcgcagcaggccgcaggcgcgcaaggagacaagcgcggcgtcgcgtgctcgcacggtgcgagtgcctcgactcattgcttctgctccttggaggctgcggcaccttccttaccctgacgcgcggcatgatcgtgtccgccgtggccgtgaccacggtgcatgaacaggtgcatcagcggacaagccgccagcagcaggaaggggagatagccggcaacatgtgccgtatgctccttgagcaggaaatacgcggcgacagcggcgatgatgaggaacgccacgccgtagcgcgatcgccagaaccgggggcgatcgctgggggtctgtgtgtgctgatgctgcatggcatatctccacggagaagggttgatggatggtcagcgatgcgactgatagaccgtgctgctaccgtttttcccaatcagcagcacgtcgtaggcgtccttgcgtccaccataggccggaccatccatgccgggcgaaccgaccggcatgccgggcgccgcgaggccgatggcctgcggggcttcgcgcagcaagcgttgaatgtccgaggcaggcacatgaccctcgatggcatagccgccgatctgcgccgtgtggcaagaaccgtacttctgcgggatgcccagccgcgtgcgcgctgcggtgttcccggtgtcgagaacctgcacatcgaagcctgcgccttgcaggtgtgagacccagtccttgcagcatccgcagctcgggtccttccagaccttggcaatcggtcggctctgcgccaggctcggtcctgcgagtgccatcaccaacaagccagcgatcaatgcctggcgtctcggcactttgccctggcttctgtcgtagtgcatgttcatggatcgcctctcatcagatgatcaaacccgctaggttctagaaccagaatcgcacgccagccacccagcgcgtctgctgcgcacggccgccttcggcacgcacatagtccgcggtgcgtccgaagctgcccgcccgttccacgccgatatagggggcgaactggcgactgaattcatagcgcaggcgcaagccagcagacgcttcggccaggcccttgccgataccgcgttccgggtcgtccttgccataaaactgcaactcggcgcgaggctccagaatcagtcgctgggtcagcagcagctcgtagctgccttcgacacgcagcgccgtacgtccaccacttcccacgtagcccgtcgcctccagctcgaaccagtagggggcgaggccctggatgccgaaagccaaccattgacggctcgggccttccccgttatccacccgaacgccgagctgggtgtcccagtacggtgcgacggcgtgcccccagagaagctcggtacgcgattcttcgagctttcctttggcgatatcgccttcggccttcacgacggccttgttgtaggtcgtcccataccacgcctggaggtcgtaggccgtggagtcgtctcctttgcgcgtgaagcggcgttccagagtttcgccgcgcaacgaaaagaacctgtgttcgtcggccagcatcagccgcggcacaccgggtacggcgtagtcgcccgatcccaatgtcaggccattggagtagccatgcggatcgcgggcgtcaggaggcgccgacccgccctgcatctgcatgttgccgtgatccatggccggggccgcggtcgagccgctcgccgacgtcgcgtgacccgcgtgcgggtcggcggcaggagccacggtctgagtggatggcgcggccgtttgagcgtcggcctggccgtgcgctgcatggtcgttctgtgcttgtgcctgggcggcgacgcttaccagggccagaagcgtcgtggccagtgcgcgagtggggagtgctttggacattcttggtcttccttgtgcgctgggttcaagacaccacgacttcgcggaacatgccggcatccatgtggaacatcaggtggcagtgccacgcccagcggccgagcgcgtcggctgtcaccaggaagctgatgcgttgtgccggctgcaccggcagggtgtggcggcgcgcaaggaagcgaccgtcggggctttccagctcgctccacatgccgtgcaggtgcatgggatgggtcatcatggtgtcgttgtgcagaatgacccgcagccgctcgccgtgtttgaagtgcaccggcgtggactttccgaactccagcccgtccagggaccatgcgtagcgttccatgttgcccgtgaggtgcagttcgacctcccggccggggcctctcttgtccagcggccccgacggggtatgcagatccgcgagggtcaacacgcgccgaccgttgttgcgcagtccgatgccggggtcatcgaggttggtgcgcgccatgtcaacgcgcatgtccgtgctggcaccatactcggtgcgagcgtggcgagcagtagtgctgggcacggccagtccccccgccgccgcggcgtgttggctgtgatccatcgccatgccaccgtggttcatggcgccgtgattcatgcctgccatcgccccatgatccatcccggacatcgaacccgagcccatcccggtcatcccggtcatgcccgtcatgcccgtcatcccggtcatctccatggcctggccggacccgccatggtccatgccccccatcatgccgcccatcatgtcgttcatggtcagccattcgaccggatcgagggcaggcacgggagcttgaagaccttcacgcacggccagcgtggcacgcgcgtagcctgtccggtccatcgcctgggcgaagatcgtgtaagcgtcatcccgtggctggacgatcacgtcgacggtttcgccaggaccgaatcggaactcatcgacggtcaccggctccacgtcaacaccatcgacgtgcaccaccgtgagtttcagtcctggaatgcgtacgtcgtagaaggtgttgcccgcaccgttgaccatgcgcagccgcacgcgctcacccggtcggaacagcgccgtccaattgccggcgggggtgacgccgttggccagataggtcagcgtggcggcagacagatctgcgagatccgtcggattcatccgcatctcgttccacatcttgcgcttgtcgatcgcagcggccgtgccttcgcgcgaggcgtcccggaagaagtcgaagacggtaggttggttgtagttgtaatagtcgctttgggacttgagcttggtgaacacccgcatcgggtcttcgtcggtccaatccgagaacagcagcacgtggtcacggtcggcgtggatggtctcggcgccagcggggtcgatgatgatcgccccgtacatgcccgtgagttcctggaagccggagtgcgagtggtaccagtaggagccgctctgctgaaccttgaagcggtacgtgaaggtctcgccgggagcgatgccattgaagctgatgcccggcacgccatccatctgatacggcaggatgatcccgtgccagtgaatggatgtggcttcacgcagcttgttggttacacggattgtgacggtgtcaccctcgcgccaacgcaatgtcggtgccggcagcgagccgttgatggtcgtagccacgcctggcttgcccgtgaagttcacgggcgattcggcgatcaccaagtcgaactcggtgcccttcagcacaggggcggcaccgcgcgtcgcggagccttgctgggcaaatgccttgaacgccggcgtggacagcccagcgagaacgccgccggcggctaacccttggacgaaacgccgacgagaaaggccctgtgtgggcacgataaaaaagggtgaacgaggcggcatggcctgaaatcctccatagatgactcggaagtcgttctaaacgccaccccatcctgagcggcacagttcgacgcaatgcaggtcatgctatgggttgggcactttccatcgaatgacccctgaattacattcatgtaatgttcgtgtcatgttcgtggaagctggcaaccagtaaattgctgattgaaagtggatgaatgcgtacatcgtgagcggctatttttccgcgccgtagcgatttcatgggacatgcgatgaaactgctggtcgttgaagacgagaacaagacggcggattacgtccgccaaggtctcatggaggcgggattcgtcgtggatctggcgcgcaacggattggacggacaccacctggccatgggcgagacatacgatctggtggtcttggatgtcatgctgccggatgtcgatggctggcgcatcgtgcgtgcccttcgagatgccggtaaacaggtccctgtgctctttctgacggcgcgtggcggtgtagacgaccgtgtcaagggattggaactgggagcggacgactacctcgtcaagccattcgcgttctctgagttgctggcgcgggtgcggacgctgctgcgacgcggaagcgctccgagccagcctgatcgcatccaggttgccgatttggtgctggacttggcgcgccggcgcgcaacgcgcgctggccaacgcatcaatctcaccagcaaggagttcgcgttgcttgagctcctggcccgtcgccagggggaggtccttccacggtctctgatcgcgtcgcaggtatgggacatgaatttcgacagcgacagcaacgtcatcgatgtagccatccgccgtctacgcgcgaagatagacgatgcgttcaatccgaagctcatccacaccgtgcgtggaatgggatacacgctcgatgcgcccgatgatgcccctgcgccataagccgcggcaaagccgtccagcgtcgcttgcattgagggtcacggccctcgttggtatcgccacgaccttggtgtttcttgtgttcaattgggtcattctccggtcgttggagcaccactttgctcaacaggatgcccacgaactggaggcagtgacaaccgctttggctcagcccttgcaccagcttgcaagtgacatcgcaagcgacgaactgaagcaacacttggccaacgcagtcgcaggacatcatgggatgacgtacggcgtctacgatggggctggcaatagcatctatgccacgcccggtcctgacctgtctaaacttgccagtagcaaaaagttggtcaaccgcatcaccgctgacgatttgatcgtgtggcaggaggatcagaggtcatatcgaggtgtggtgctgcaactgcctgctgacgattcagcggcgcccggctaccgcatcgtcgctgccatggacatcggctttcatctcgacttcctggcggagttcaagcgcatgctctggtgggcaaccggcttggtcatgtgcctggcgctcggtgtggcttggctggcggtgcagtggggccacctgccgattcgcaaggtcaatgaagagattcgggcgattcgctcttcaaagctggatgtgaggctggatcctcgggatgtgccgatcgaactggcggaactggtattcgccttcaacgatatgttggcgagaatcgaggaaggcttcacccggctatcacacttttccgcagacatcgcgcacgagttgcgcacgcccgtcaccaacctggtcacgcagactcacgtggcgcttggccagccgcgcagcaacgaggaatacagagaaatcctctattcaaatttggaagagtttgatcggatgggacgcatgattggtgacatgctgtttcttgcccaaacggaaaatgatccccgcaacttgcgtctgtctaccattgatctgtccgaattggtgcggagtctgttcgactatttcgaggcgctggcagaagatagcggcattacgcttggtgttaaaggggcgatcggcagcatagcggcggatcgggaaatgctcacccgggcgctgaacaatcttctctcgaatgcaattcgacacacgcctcgcggcaagagcatcacggtcttgctttcgcaggacgagcagtggacaacgatcagtgtggtcaatcccggtgagagaattcctgagcgcgatctaccaaagctcttcaaccgcttctaccgagttgatccggcacggcaacgaaatacggcgggcgccggtcttggccttgccatcgtgaaatcgattgcggaggcacatggtggctccgttgccgtgacctccagtgagcttgtcaccaggtttgacttggtattgccccatctgcggcagtagtccgagggcgctgcggtccgtccagccaactggcgtatctctttgcctgattctgggatctacccggccggccacgttgctacgcgagcgggacattttttctccgtgactgccacgtgcccagtcctagcggcaggcgccgacatcatgcgcttgtgtatcccatcgctacgtccacaccgcgcgcgggggcctttgctcggtcgtgatccggtcaccgatcgtcgatagcctcagcggtcagtgccgaacgtctgcctgctcggcgcctcgatcgcgcgcagacctggctgtgtgcgctgagcccctgaggtgagttggaagttggtctgctggttcgttgcgcgggtatatgtacccgtagctgggtacagagagtcttattgatcaagatcaaggtactgctatcaggcgccggctgcatatgaacgcagccaaccgccaaaactacctatgcaggtgtccactaaaacttgaccactgcaccccgcccgaaggcttctccgactcgcccgctgacgcgggccaggtcaaccccacaacgacaggcgagaacgccccgccatgccttgcagcgccggtcttgaggcgtggcgtggaagctccatagcgatgccgggcgggttgtccctgaaccgcgttgaggacggcacgcacctgcacaacctgccgcagcaagcgccagcgtgttcgccagcgtcccgtccatcgcggcggggcgctggccgggccgatccggcgcagccggttcggcggcatcgaggggcgccaagcatcgcgcggcggggatagcccgcagggctttcccctggaggcaagcgaagcgcgcagcgccgcaggcgcgaaggcgtgagcaactgtcttgaaagtcaagcctcgcaagcgcgcaggctccattcaattgaagcgttttgccaatgattcaataaatgttgtattatcgaatcatgaacgagacccaagccatttccgccctcggcgccctggcccatacccagcggctgcgcgtgttccgcgccctggtggtcgccggccccgaagggctgacacccagcgtcctcgccgaccagctcgacgtggcccgcaactccctgtccttccacctgaaagaactggcccatgccggcctggtcaccatcgagcagcagggccgcaacctgatctaccgcgccgacttcacccagatgaatgggctgctcggctatctgaccgagcactgctgccagggcggcgcgtgcgaggtcaccgaatcctcctctgcctgtacttcctgctgaaaggatcacccccatgaagcgctttcacgtccacctgcacgtcgatgacctgaaccgcagcatcggcttctattcccaactgttcgccgcgcagcccgcgcgcgtcgaaggcgactacgccaaatggatgctcgaagacccgccggtcaacttcgccatctccacacgtggcaacaagccgggcatcgaccacctgggtatccagaccgacgatgccgaggaattggcggtgctgaaggcccgcgccgaggcggccgacatgacgctgctggacgagggcaccacgacctgctgctacgcgcgcagcgagaagcactggatcaccgatccgcagggcgtggcctgggagcacttccacacgctgggcaacattccggtctttaacgaagcggcgcctgcagcgacttccgccgcagcgtgctgtaccccggtgcgcggcaagccggtgggcgttgcggtgaagccggcttcctcctgctgctgatgtgagatacccatgaccaccgacaagacctacaacgccctgttcatctgcacgggtaactcggcccgctccatcctggccgaaggcatcctcaatgaattgggccaggggcgctttcgcgcctactcggcgggcagccaccccaagggcgaagtccacccactggcgctcgccacgctggagcggctgcacatgccgaccgccggctaccgcagcaagaactgggacgagttcgcggcgcccggtgcgccggagctggatttcatcttcacggtctgcgacaacgccgccggcgaggtctgccccgtgtggccggggcgcccgatgtcggcgcattggggtgtgcctgatcctgcagccgttgaaggcaccgacgagcagaagcgcaaggcgttcacggatgcggcgctgacgctgcgccgacgcatcgaattgttcctgtcgctgccgattcagcgcctggatgccatgtcgctgcagcacgagctgcgcagcattggtacgaagtgaggttggcgcgatgagtgttggaacccaaacggccggccgcgtgccggccgcccccaccatgagcgtcttcgagcgctacctgagcgtgtgggtgctgctgtgcatcgtcgccggtatcgcgctcggccagttcgcgccgggcgtgttccaggccatcggccgcacggaagtggctcaggtcaacctgcccgtgggcctgctgatctgggtgatgatcattcccatgctgctcaaggtggacttcggcgctctcggccaggtcaagcagcactggcgcggcatcggcgtgacgctgttcatcaactgggccgtcaaaccattctcgatggcgttgctggcgtggatcttcatccgccaggtcttcgcgcagtggctccccgccgaccagctcgacagctatgtcgcgggcctgatcttgctggccgccgcaccttgcacagccatggtgttcgtctggagccggctgaccgggggcgatcctgtgttcacgctgtcgcaggtcgcgctgaacgacaccatcatggtgttcgccttcgcgcccatcgtcggcctgctgctgggcctatcgtccatcacggtgccgtgggccacgctgctggtatcggtcggcctgtacatcgtgattcccgtcatcctggcccagttctggcgccgcgccctgctgagcaagggccaagccgccttcgaccgggcgctggagcgcatcgggccgctgtccatcgcggcgctgctgctcacgctggtgctgctgttcgccttccagggcgaggccatcatccgccagccactggtcatcgccatgctggccgttccgatcctgatccaggtgttcttcaactccggcctggcctactggctcaaccgcaaggcgggcgagcagcacagcatcgcttgtccttcggcgctgatcggcgccagcaacttcttcgagcttgccgtagccgccgccatcagcctgttcggcttccagtccggcgccgcgctggccaccgtggtcggcgtgctgatcgaggtgccagtcatgctactggtcgttcggatcgtcaaccaaagcaagggctggtatgagtgcggcccgaaccctgcccgcggataaccaagacacgactcatgagcaacatcaccatttaccacaaccccacctgcggcacgtcgcgcaacgtgctggctctgatccgcaacagcggcgaagagccgaacgttatcgaatacctgaagacaccgcctgaccgcgaaacgctgcaacgcctgatcacggacatgggcgcgccaatgcgcgccgtgctgcgtgagaagggtacgccctatgcggaattgggcctcgatgacccgaagtggggtgacgagcagttgattggcttcatgctccagcaccccatcctcatcaaccggcccatcgtggtgaccccgctgggcacgcgcctgtgccggccctcagaggccgtgctggacatcctgccgcagccgcagcgcggcgcgttccgcaaggaagacggcgaagccgtggtggatgcggagggtcgcagggtctgagacctcccgcacaagcggcaggcaatctgaagtgaggctggtattatcgaatttcgttatcgatattcgatatgaaagagaaacctactccacgtgccatggagcaccacgacctgctgtcggggctgatccgcctgcatgtgctgcaccacgcagccgagcaggagatctacgggcaatggatgatcgacgagctggcccaccacggctaccgcctctcccccggaacgctgtacccgatgctgcacaagatggagcgcgacggctacctcgtctcccgccaggagcgtgaagggcgcaccgtgcgcaagctctacacgatcacgcccaagggcaaggaaggcttggcgctggccaaggaccgcatccgggagttcaccggggaggcgatgcacaaatgacagattccaccaacaccttgcagcatgaggccgctgccgcgcgcggctcacccgtcgaagtcttcggcgccttcctcaagctggggctgacctccttcggcgggccgatcgcgcatctgggctatttccgctcggagttcgtcgagcgtcgccgctggctggatgaccgcagctactccgatctggtcgccctgtgccagttcctgccggggccggccagcagccaggtcggtatggcgctggggttgggccgcgcgggctggctggggctgctggcggcctgggccggattcaccttgccatcggcgattgcgctgatcctgttcgcctttggcatcgccgagtaccaggggctggcccagtccggctgggtgcacgggctcaaggtcgtcgccgtggccatcgtggcgcaagcggtctgggggatggccaagtcgttgtgcccggaccggccgcgcgccgcgctggccattctggcggcgctgctgaccatggtcctgccctcggccgcgggacagcttgccgccatcgcggtggcagggctgctgggctggtggacattgaagatcgcgcaacccggcggcggccacgcccacagctaccccgtctcgcgcaagctgggcatcgtggcgctgctgctgtttgccgcaccgctcgtcgggctgcccctgtgggcggcagccacggactcgtccacgatagccctgctggaaggggtgtaccgctccggtgcactggtcttcggcggtggacacgttgtgctgccgctgctgcaggcctcggtggtgcccagcggcgtcgtgagcaatgccgacttcctggccggctacggtgcggcgcaggccgtgccggggccgctgttcactttctcggcctacctcggcgcggtcgcccacggaccgctgcatggctggatcggcgggctggcactcctgggcacgatcttcctccccgcttttttcatgctggtcggtgcactgccgttctgggaagggctgcgccaccgcgcgggcatccagacggccatggccggcatcaacgccggcgtggtcggtattctggtgtccgccctctatgacccggtatggacgagtgccatccacagcaaggcggattttgggctggcgctgctctcgttcggactgctgacggtggggcgcgtgccgccggcgctcgtggtgctgttagccgggctggtgggctgggtcatggcgatgggcgtctgaatctcatgtggcacaccctgaccatccagctccgacacgaaaccgccgacgacattgccgccatcgaagcggtcacgaccgccgccttcgctgatgcaccacacaccagccacaccgagcaattcatcgtgcgcgccttgcgtgccgccaacgaactgacgctttccatcgtggccgaagaacatgggcgcgtcgtcggtcacgtcgcgctgtcgccagtaacgatcacccatgagcacaggcgaaagaccgagggctggtatgggttggggccgatctccgtcctgccgccaaggcaggggcgaggcatcggttcgcgcctgatggaacaggcgctgtctgaactgcgggctatgcaggccgcaggctgcgtgctgctgggagatccaacgtactacacgcgctttggcttccaggcccatgcgggcttgcaactgccgggcgtgccgcccggctatttcatggcgctggccctgcatgggacagtgccggaaggcatcgcgcactacagcgatgccttcaacgccgccgcctgagccagcgcgaaggcggcggcgttttaattcggctattggccttgaacaccgggcgcggccactgtcgcacccggatttcgcgtccaccgcgcccagggcggaacggcctgggcgcggtgctgatcgcggttattccttcgtctcgatgcgccaccacacaaagcgaagcgccccggtcgaggccggggcgcttgccttcggcgcgggtcaagcggccagtgcctcggcgggttcatccgccattgcctcggtatcctccggggcgtcctgctccgggccttcttcctgcgcggcctcctgcgggccttcggccttgaagatggcgggcatccagccggtgccatcggccagccgctcggcctcgctggcaatgtcggccttcttgagcttcgccagccgggtgacgaattccggtgcaaacgcgcccacggcatccagaatcacggccttggaaacgtgcttgaagtagccttctgcggtcggcttccaccatgcggccatgtcgaggcccacggcctgcgccagttctgcgccgggctggtgcggcgtggcacggggcgtcaccacgtccaccgtggaagccacgcacacggccagcagccgcaccagttcgtcttgcgacttcgccagcagcgcggcgaacagttcggcgctgtcctccggcaaggcttccccggctacctgttgcagttcgcgcagcgccacagcggcgggcgactccggccagtccggggccatgccttccagccggtcttgcactttcaggctcacgcccagcggcaggtcgtggccgtggtagctgtcctgcaaaaccttctgcaccatgccatgcaccagcgcggccagcgcgacgtgcggatgccgggccacttcgatttgcagcgccgccgtgcggtgggcgctcaaccgctgcgccagctggtcggacaggctcgcggccttgggcgggtcgtcggcgtcctcgtgctcctcgttggcggcttcgccttcggtgctgccgaagccgcgccgcagcttttccagcgtgcgcagcgccttggcctcggcttcgcgcagcaggccgcgatgaataacagcctcgccgttgcggtcgatggtgacgatggcaccggccacctcgcgcacttcgggggcgtagccttgcaaggcattctccgcgtcttgcagttctccgaccacctgatcgcgccgctgttccagcttctcggccttggcctcgtcctcggcgtcgcaggcttcttccagttcggcgtcgatcttttcgaggcgggtttccagcgaggcgatgcggcgggcctcgcgggtggtcggctcgcggcggtggcgcggggcgttctggaacgcctgccgttcctcgtaggccagatgcggcacggcctccacccatgcccagccctcggcgcgcacgtcctcggccagcgttgccagcttgtcgcgcacgagcgtttccagcactgcggtatcggtgaggtaggttccggcatcgccttccgcgaacaggtcgcggcggatgccgccgcctgcctgccggtaggcgtccagcccgacgaagcgcaccagcgcgtgcgcggcgtcgatttcgcgctcggtcaggcgctcgcgcagcttggacgggctgcgctgccattccggcgcaccatagaacgtggcttcctgcgcggcgtggtcgtcggcgaagggacacagcaagaccgccccctcacgccacccacgcacgccggttttcggcaagcggagcgcgcaggcacggatcagcgagccgggccggaggcgccagcgatggaagcccgacaggggcgagactcgcgcagcgaggctcaatgcgcagcacgacagcgcgacggcggcacgccgggacgcccgactgcttgggacaggactactcgttgtcggtcttgcgcggctcgatgtgcaactgtccttgacgtgcagccgggcgtagttgcgaaggtacagcgtgtcgtactgcttatcgggcgatgtcaggtgcaccaccatcaggaaggcgggggactgcttttggacggtgatgccctggcgcaccacatcgcgggcagccgggcctgagcctgggcgacgcggttttgtacccgcaccgtcgcgtcatcggcgttgatgccagaacggaaggtgaccgtggtcaccagcacgccgtcggagccggcgacagacttgatgtacatcatgccttcgacgccgttgatctgctcctccaggggtgtcgccacggtctcggcaatcaccttggggttggcgcccggatacacggcgcgcaccacgaccttgggatattcgctgatcggcagcgccgggatcgcgagcaggcccgagacgaagatgacgatcgacagcacagccgcgaagatcggcctgtccatgaagaacttggagaggtccatgggctaataccttgaaaggagtccagggggaagcgcgccgcgccgctcgttgtgtgatacgtccgatcggtggcgcgctccggcgtggtgcttcatttggtggcggacgcgggcgccgcagcagccaccatgggcaccgccgtggcctgcacaggcatgcccggcaagaacaccttctgcgcgccgttgacgatcacgcggtcgcccgccgccagcccccctcgcacgatgcgcagccaatgggaactgccacccagtttcacatcacgtcgctgcgccagtccatccttgtctacgatgtagacgtagttacggtcgtggtcggtcagcaccgccttgtcgtcgatcaacacggccgagaattcgccgctgccgaccagtcgcacgcgggtatagaggcccggcgtgaaaacgcgatccttgttgtccagcaccgcgcgcacggcgatcgtgccgctgccccggtccacctggttgtcgaggaagtccaccgtgccggtgtgagagaagtccgccttgtccgccagggcgatctggaccggcagctggccgcctcgctcgctggggcgctctcccttgcgcgccatgcgcgagtagcgcaggaacgccttctcatcggcctcaaagtaggtatagaccctgtcctggaacacgatggtggttagcacactggctgcatcgctggcggccaccaggttgcctgcggtaaagcgggcacggctggcgcgcccgttgatgggcgagcgcacttgggtcctctccaggttcaactgcgccgtctccaccgcagcctgcgcggcctgcacctcagcctgcgcggactcgtcagcggcgcggcgctgctcccaggcctcggtggagacagcctgctgctcgaccagcaccttggcacgttgcgcctcgcttctgctgcggccggcttcgctgcgcgcccgggtcaattgcgcctgggcccgggccagttccgcgcggtagcttcgggcatcgatcatgaagagcacatcgcccttcttgacctcgtctccttcgcgataggcgacccgctcgacgtagccagacacccgtgggcgcagctcgacgctctcgatggcttcgatgcgtccgttgtattcgtcccattacgtgatgggcttgatctcgacctgcgcgacgctgacttgcggcggcggtggatggcctccggcgccagctccggcgttctctttacaacctgcgagcgccatcgcgctgagggagatcagtatccaaagcaggcgcacgccgcgagggtcggagctggaagtcgtcatctgaacaggttccgtggtcaggtcgtaaagcgaatgaagcgagcgcgatcgcgctgcacgctgtcccctgacgctgctttcttggcagcgcaagaccatgagcgacagatgcggcagagatcgaatcccgttggttgtcggcttctcgtctcgtcgcagaacgcgcgcgcaaaccgacctcggcggcattacaaagcctcaaaacttgaggtcaagcgatatcgacgttctgattcgcgccgttgcggattggtccgccgcgtcgcatttttggacggctcttgagccgccggttacgcgagaagtgacaagtaaggattgttcggtggtggctctgcgaacaggagccgaacatcgtgcaatagatagccatacaggcggcgggacttcctggggcctgtgacatcgcacgtccagatgttcaggcccctgggctttttgcgatgcagttgcaggcgctcgaagcgcttttgtacccattgccaatcctgctggttctcctgcttggcgagagtcccgacctgggggtgttcttgtgcgtagcgttggaataccccggggctgaccaggtaggccgtgtcgcccaccgtatgcacgagcgccttcgcgtcgttgatgaccagccggcgggtagcgataccttgtttcagccacgccatgaagtgctcgcccgatggctgcgccgacgaggacgtgggcaccggcgctgatgacggcacgggcaccatcgaggttggcggtggcgtttgagggccagcggcgggtgcgtcgcccgagacggcttccgcatcctgttggggaacaagcaaatcgccgattcctaccatcgccagcaggtcctccatgacatcgggtgcggcttgtgcggcaggcaagtgaaccggagtcgcggcgtcgacgccctcccatggaagggactcttgatcgtcggtggctggctttgccgtcattgccggcgagggcaccaaggcatcggcattgttgggtgccggtgtcccgtcgattgccactgcccctgcgaagggcgctggccgctctccagactcccaaatcagcgcgggagcgagacgcagcagggtgaatgagtgggaccagccagtcgtgctggtcacggtcgcgcgccagaccgccttgccgtccggcgtcggttgcaacatgccgtgatcctgcagcacgttgaagacggcggtgttgctcgcggggatgccgtcgacgcctagtgacagcaggtgcgcacgcagcttgtccgagaccgtcttgcttaccagccacaaggcatcctcggtgatccagccatcggaggcttccggctggttcagcttcaactgttccttgagcaggtagcgcagcccgtcgagcaacttgcgctgcagcgcatgcttgtgtgcagccatggcgcgggccggatcgccgcccagttcctgggccaccgaagcccggtcggcctgcacgacaagttcgcccagcacgccggcgcgctcgtactggccggccaggacgtagagcagcggtccccacaggtcgggatagccactgagccagtccagggcatcacggtcgagcagttgacggtagagtaaacctgtcgcggcgctgtggagccgatattcccgatcgtcgcggtagcggaagcggtatggctggtgcagcgggccgtgccaggggtgccacagcgagccgtcggacagttcgacgtgcagatcgacggcgatcttgccgatgtcgtgcagcagcgcggcataagcgactgcggcagtccaggcttcagactgcgccgcctggtcttcgggactgccgccaatgggcagcagatgggactgccgcagcttgagcgcataggcgacgatctccaacccgtgatccagcatgccgccggggtaagcgtggtgatggctttccgatgcggggaattgttggaccaactcggcgtagtgctccagcggcgtgcggtatagggtggcgaactgccgccgcgacagcgacgtgcgctgccagatgtgttccagcagcttctgccggcgcggtgttgccagcagcgatgcggccgattcgggccgcagcaaccctttcgggaggtcggtggcgggcgctggcgacggggcagcgaccgggggccgttttcgctggaacagggagagcatgcgggtgtcctctggggggccggccgggaggccttttcgccttttcgaggtagggcctttccccttgcaccccattcccttgccgtttcggccctttggcctttaaccgtttcggtatagccgggcctgggttgcgtctccagcgtcaatgtggaacccgcacgaatggattggacggagacctggcgctggcccctgcctatgctgcggggacgctacccccggcaggtaggctctcgctcaggcgactaagttgacaaatgcgacaagggcgactagagtgaatcctgtctcaaacctgcttgggagatgaccatgcccaccgccattgaattcattgccgatcgtctgccgcgcgtcaccgtggaggacgtgcgccgtttcgcggataccgttgaaatccgggatgcgccggctttcgcggccgagttgcaggcgttcattcacgagcgcgtggaggcggtaaaactgccagccaacctcgaaggcgaaacggtggagcaggccctggcgcgcaaggcggccgcgctgcgcaccgaaacgcgctggaccccgactgaaaccgacgtccagcgaggccgcgccgtgttgctggaatccttcaaccagccgcacaacctgccgatccccgagtacgccaagctggcggacaagtcgcgccagcagatctacaaggacatcctcgcgcgccggctgctggcgctgaatgtggggccgcgcggccagaagctgcccgactggcagctcgacccggtgaagcagcagttgacccaaaccgtgcttcaagaggtcgagggcatcgaccactggacgatctaccgcgcactatccgaaccgctcgaaggcttgggcggacgctcgccggtggatgcggtgacgcatggcacaatcgatgacgtggccgaagcggtgttcaacgtgctgggcgtccaggtgcattgaggcaagaccgccatgagccgcgaactgcccttgttcttgatcgatgcgggtgaactgctccagcatgtgagccgcgtcgtctatcggggcagcccgctgtactatggccgcagcggcaccaatcgctacgacgacccggcgcggacctacggcgtgctctacctgggccgcgacctgtccacggcgctgatggagtcggtgtttcacaagcaccagtggctggcggacgagaagcgctcgattgcgctgaaggaagtcgagagccggctcgtgcgggccgtgggggtcctggacgacgtgcgcttggccgatctcacggccgagggtgtcatggcgggttacttcggcctgaacctggaacagttggccagccgcgactacacgcacacgcagcaggtgtccgcccaggtgcatgcgatgctcggcgatgatggccagccgctgttcgacggggtgctctatccgtcgcgcaacaactatcccgccaagagcatcgccctgttcgagcgtgcggcagcaagagtcggcgttgtcgatgacatcgacctggtggaccatgtggactggccgcgcttcgttgccacgtatcgcgtcggcgtggagcctgatcccgggccggtggaaccggatgacgaagcgtcctgaagcggcaagagagcacattgaagccccaaacagaatgaaatggaccaaactggaataggcatccctctgtagcaggagacgaccatgaacaccacgacccgcatcagcaccgcagaacgcctcggccgcacctttggccgcggatggcgcgcctacgcgcgcggcgaacgtcgggcgtcgaactggttggtgtccaagggggtgccggcggccgttgccaccgcgctcgtgtgggtggtcaagctgtctgtggtgggattgctgctctacgttgctttttggttcgcactcgtgttgttgggcgtcgtggcggcggcgtgggctgctgctgccaatacctctgacgaggacgagtggcctttcaccgatctcacagaactgcgcaagacaccgggctacgatcccaatctgtacaacgatacgtcgcacgagttgtacaccgacgactgacggactccgggctacttcagcttgcctcccgtgagtgccccagcccccttgcccccggcttggccggcgctcttgctgccgtccgacaacccctgaatggcatgtcccgcccgaattccaacccaggtcaggcttgccagccagaatcctggcagcaccaggaacatcgtgcccgcgacgaacatcaagagcatgtcgccgaacgcattgttcagccccaccagcgggtcgaagttcgtgtgtggccggttccagccaaagccccagccatagagcgcatcgaggatagtgctgtcgatccagcgagcgagctggaaccagaaatccacgaagaacagcgcgaattgcacgacgctgaccgtgacgaccgtcttcaggtcataggtgcccacgaccagcacgagcgggatgcagatgaccagcgccatcttgagcaaggcgaggaccatgggtagagactgtctcacgacgtccatggcgggaaacgcggcaatcgcgccgacggccatcccaacgtctcccgtggcccgtgtcacgatgttcggcaaggtcttgtcgatctggcctccgtagtccgtatagacgctgccctggttcaacttctgctgccgcggtgacgcgatggctcggatcaccgagtcgtccacctcggcccggctcaggaacccggcccagcccgccaggcgactcaacaggctcgggtccacctgacccagcaggcgtgcccgcaggccgttacttccatcgctccaccactggcggcaggtcgggtagccgccaccgctggccacctgcgcaagccctgcgtcgcgggtgctgtcatagggccagtcctcgcgtggggtgctggaacggtatgtgtcgtagtagccgttcgtgtcggtgaagaaccgcgatccgatccaggtcacgtcgtgcatctgctgctcatcgagctgagggcgctgcatgaacaatttggcccgtgcaggcccatagcaatcccgcgagaaatccgctacttcctgagccagcaccgggtcatcgatgcgcgtagcgtcgatctccatgcgcatctgccgcaggtccgtgccgcacgggatcgctgccaccgaagcgcccgtgacggcgcgcgagagcgcgtgcatgaacgcccaccacaccggcaccttcgccgactggttgttgatggtgctgaaggactgcgaccagccggtatccccgggctgcgccacgctgacctggcactgggccgagcgcgagctgtcgtactggatggtgttcaggtccacgtcgatgaacggaatgccggcgaacatcaccaccacgatggcgacgaagacccggttctcgatgcgggcggcgctcagcacgcctttgttgccctcgtcggcgccttccgcacgggccttcaaccactcctgcacgatgatggcgacgaaaggcagcgcgaataccccgctggatacgaggaccgcccagatgccgttgttgacgatccaggacacgagggttaggtagtactccaggtagtcggtcgtgaaaagcgtcatggcctcgatcccctcaagcggcctgcatcaacaggctggcttccagcgccacgatggcaacaatgccggcgacctcagcgcgaatcagccggcgtcgggccagcgtgctgtcctcgcgcgccagcagccgccgccgcatccagacccagccgcaggccgtcgccccgtacaggaacaaccgccacacgaagaagtagcccgatgcggccgcgagccaccgctcccagccggccacgctgccaacgagatagatgccggcgatgttggcgcccaccgcagcggcgacgatcacggccgcccacagcagtgctttcgccgcacgccggctgatgagccagcgcaaggggcgccaggccatgcgctccgcgctcatggccggcctcccggattgcccttctgcaactggtcgaggcggtcgggcaccggatcgccctcatagatgccgcgcgagcctgccgcgcgcgtgccatggcgctggatgatggccatcggcgagttgttcgccagctcgcgccgcagttcaagttcggtcttgaggttgcggatctcccggtcgagcgtgtcgctctcgtggttcacggcctcgactgccaactcgttggctgccacgttgggctctttcttgccggtgagcagcgtgcgctggagcagcagtgccttctccagcaccgacgaaagcgccacctcggacgcgaggcgccgcgccagcaggtcctggtccggctcgtcgcgcagcgcctcgatgacgccgcgcgtgatcggcagcgacgtgctgccggcctcgcgcaagttctcgaaggtggtgttgcgcacgccggaaaccagttcctgcaagacttccagcttggcttcgtactcctcctggatcagcggcgtcagcccgacgccgggcaccgtctcggtcttggtgcaggaatcgcacgtgcgctgcacctgttccccgaggacccgggtggcccattcggtcgcctgctgcggcgacgtccaggtctggcaggacaggctcgcgcaactggtggacgcgatggaggatgtgtccgtcacgccgcgcccgttgaccaggttgtagcccgcgcgggtgacgtcgccgaccacgcggatggcggactggcctgcgccaccggcattgctgccgcccacccagggaaggccgtcgttgccgcggcgcgtctcggcctgctcgacggccgacacggcatcgttgctgccaaccgcgtcacgcaaggccatgccttcggccatctggctccagccaagctggccacccgcagtctcggccatcttctccgccatggcgcggcacgtcagcttggagcggtcgaagtccagccgcgcctgcagcacgccgttggtcagcaggttgtacaggcccggatcggcgcgctgaatgatcagcgccggcagcgatgcaaccgcgctggtcgcgctctggatcacgttgctcatgatctgctgaaagccgttcgtgatgccgttgagctgattgcgcagcgtggtctggatgctcatgtcgccgcagatcaggttgctgttccaccccacgccgaccccgatggagcgcatgccggccgcgcggcccatggacaccgcactgccaccgccgatcgagtacatgacgtcatcgccgaggacggggccgctgttctggtatccgacctgcgcccacgccaggccgcagaccagagcgagcgggccggccagcgccttcgggcgcagcaggcggcacgccttggcggaaaggttcatcgattcaggacgcttcatcgtggcacctcagaggaaatcgacgctgcccaggaacacctgcccgcggcgttcgcagcacgcatagggacgccacagcgcccaggcgtagtcgccttgttgggcctgggtcagcgtgccgctgtgcgggaacaccacgcaggtgttggacaggcgcggcgtcagctcctgccacttgcccgtagaggcatcaccctccatcagcgcgccggccggccagtagccgtcgcgggcgttggcaagcagcggctggtacacgtggatctgcccgcggcgcgtgacgacatcaccggcgcgctgggccacgacggccccggatttgtagtcatcggtctgatgcaggaagccgccgcgcggatagacattgccccagaggttcatcgtggtgcgcgcaccgacctcgcgcatgcccggaatcaacgcctccgggtaggccatttcaggcacgttgtagcgccaagccagcgtgtccagggtgctgagtagatacggcatgaaggccgtgcccgcgccttggcagaaatagcccgacgacgatgcgaactggttgaatacctcgccgccaggatggccgatgacatcgctgttcttgaatttggcgaggttgttttcgtggtcttcgttcgtggtcccatccccacctgcctgtgcggatgggttgggcgtgctcatcgcctgcacctcgacccaggggttctctccggtgttgctgtagctggagacgaccgcatcgggcacgtagtgccggaccttggtggatgtgcgcaccgtgcagcccgtccaggtgcagtagagccagtagcagatgcccaccacccggtactccaggcagtccggcgacatgacggaggacacgatggtggcggtgttcaaggcgtagctgcccgtggcgctgatcagcagcagcgaggccacggcgacgcgcaggcggcgcagcaggtcgaatgggcgatgggtcacggctgcgtcctccggtgttgctcgatgcgcgcgacggcccgggccacgtccggctcgccatagaccacaaagcgttgatccaccacgacggccgggatggtcgtgacacccaaactccatgcgtcggtgacgccctggtaggcggtgccgatgcggcgctgaagatcggtgccgccttgcttcaggcgttgccggacgatggctgctgcccgctcagggtcggctggaagattcgcggaaagctcggcctcgatccggggcgtttcgcccaactcgatcagtcgctcgccgcccatggtcttgaccgggtggcggctgtcggtgacgaccaccacgtcggcggcgaaggtggccgggctgaacaccgccagagacgtcggcagcgccacggccaggccaagggttcgccagcctggtgcgaaccgggtaaaagctgctggcatgtcatgtgccccggaagttgatcagggccatagtcaaacgccgaaccccaggcggccccaacaaacaatgcgcatcgcggccaccccgcatacctgcttgcgtcgccgcaaagaaaaaagcggaggccgaagcctccgcgctgatcaacgaagcagtgcaacccttacagcaggccggactccgcaaaggagaacggggcaccctggccgacgatgatgtggtccagtacccgcacatcgatgagcgccagcgcggcctgcagttgctgggtcagcatgcgatccgcgctcgacggctcggaaatgcccgaggggtgctggtgcgcgaagaccaccgcggcggccttcaactccagcacacgctgcacgacgacacgcggatagaccgaagtcgagttgatcgtgcccctgaacaacggctcgtaggccagcacctggtgcatgctgtccaggaacaccgcggcgaatatctcattgggctcggcgaccagcttcacgcgcaggtagtcgcgcacggccgtggggtcgaggagtttcgcacccgctttgaaaacccgcttctccagcagtgcaatggcttgctggatgatccagtcctcgtgttgggcagcgatggcggaaagcgactccaggcaggagtcattgacgacgaaagacatggcgaacctccagacggtgagatcggagggcgcgcgccctgggagggcaagccctcctggggaacgaacaaggtgcatccatcaccgcggcagcggtgatcgttcgcggccaggatgcgaggcgaacgggtttcggtcagcgcagtggactgcgccgtagccttgaagaccggggctacctgggcatgtcgccgacgacgtcggcaggcatttccgatgtagtaggtgtggcggcgggatcgccggccgcgagcatgtccatggccgacagcaaggcatcgccctcgatcggaccctgcagtaggatcgccttgccggtttcgcgatcgtgcagccgcagcgacggcgtggcggtcacgccgctgctcgtggcttccgccgtctgggtgcggatcggcgcctcgggccgttcgctcgccagacactgctcgatggctggcgtaaggtcggggtaccgcaggtcctcgggcaagccctggccgtcgctgcgcgtgtgggcatagacccactcgacagcctgccagaaggcggcatggccgccagattcgccggcgcactccgccaggctcgcttcggcagacgcggccggctcatgcgcggccaacgggaggtggtgccattgcaaggccacgtccgcgttgccggccacccaacgcttgagcactgggaaataggatcggcagaacgggcattcgaggtccgcgtagagcgtcagcgtgaaacgcccttccggatttcccatctgccacggaggcccggccacctgcgtcacgctgaccggcgttgaagtctggggagtggacttgccagaatagcgggacacgagccagatcagcagcagcgctaccagcacggcggccaacacccagggccagctgagcctccagcgccgacggcggaacgcctgtacctgcatcggaatggatgggcgtttctgttccatggcgttctccggtgtacggcagattcagggcaggtccagggtcggcgactcgatgccacgtgcccggtcgatcttctcagccaccttgaaggcggcatccagctcgctgacgccgtgctgctgcatgagctggtagcgttctgccttctcctcgggctcggtttgcgcgagcgcgaggtagagacttggcggcacggcgcggaacagcacttccatgctcttggagaggatgacgccctcggtgaacttgcccgcttccttgcgtgcggagagcatcagcgccttctgcgccggcgagagttcgcggaacctggcgatcttctccacttcgtccggcggcatcgacaggcacacccaccactcgatcatgttgagcatgggctctgcggcgcgcggcagatcgtcgatgttttgcgtcgccagccagaaccaggcgcccaacttgcgccacatttttgtaattttcacgacatagggcgcgagcagcgggttcttggtgatgatgtgaccttcgtcggtcacgttgacgatcggccggcccaggtactggtcgcgctcggcgatgttgttcaccgtgctgatcaggctgatgtaggcgatggagagctgcgcgttgtagccctcgcgggcataggtcgccagatcgaccagcgtgatgtcggcctcgggccacggcgtgccgtcacggtcgaacatctcgccgtccgtgccttggcagaacatgtccatcgcgtccgccatctccagcagccgcacgcgccgcatctcgggcagcgtcgggtcctggccacgggcgcgcagcgcgttgcgcacgtcgcgcgtgagcacggtgcgcttttcggccacgcaatgttcggcggcgtcgaggatgcactggcggatcagcgagcggtcggcccgcgtcatccgcgcttcttccttgtcttcgccgcccgtgatcatcagccgcgctgtgatctccagttcgcccagcacgtcgcgctgctcgtccgcttccatggccgaggcatcggggggcaggtcttcgtccagcgcgtcggcatcgagcgtctgtacgtcgctgggcgtttcgatcagccggcgtgcgtcggcgaacggcgccaggctgatgcccgatccgggggccagcttgacccggttcacggtcaggcccaggcgcctggcgaagtcgctgaacaggccgaagctgttgccggcttccacgatgaaaagccgcggccggtagatggccgtcacctggttcagcaggttgttgagcgtggcggacttccccgagccggtggggccaaatagaaacagatgggcattcatctgccgatccaacctgttcaaggggtcgaacgtaatcgggccgccgccgcgattgaacatcgtgatgccgggatgccccgtgccctgggcgcggccccatactggcgacaggttcgccgcgtgctgggcgaacatcagttgcgtgtaccaccggcgccggtccttgccggggttgtagcagcacggcagccagcgcaggtagctgttgagcggcgccacctcgtcgtcctcgcgcaccggctgcaggccggcgttgagcatcacgttcgcgaggtccaggccgcgccgatccagttccgcctcgtcgcgcccgcgtaggtagaacgccagagtgccccggtagagcttgtgcgcgctgccgatcagggagcgggcttcatgcacgtccttgagcgtctgctccgacgccagcgtctcgcccacagctttcttcgccagatggttgaggtccgattcgaggacgtcctgcggcgtggccaccatggtgagacacatcaaggtgtcctcgggcatctggtcgaacagcgtgttgatcgcgtcccccttgcgggtctcgccggtcaggtgcccggtgccgggcggcatgcgcagccggtcggtgatcagcacgcggtgcggcatgccgtcgaagtaccaggccccttgcgccacgtccgagcgcggctgcccaaagaacagccgctggctgaaatcccgcccgctcgccagctcgatctcgccggcctcgctttcctcggtactgtccggatagcgcgccaacgcgtagaagcgctcccggtcctccaccccaggcccgagcagcgtggggcgcgggttgaaccaccgcagcagccagtcgtggacgtcggccgcgaccatgcgccgggcctggatgccggcgttcgccaggccgccgcacaggcggtcgcagacgatgcccagcatctgctcgggtgtctggccgcggcggtttgcctgtccctgtccgctcgcgcggcggtacaccaccatgcgcacgcgccgcgtctggccgcgccagcgcagccgcgtgaccaccgtgtcctcgaacaggccgccgggcttggccacagcgcgcaggtggtggccgaagaagcgcaggtagaactcggtgaacgccgagccgcgcgcacgtggctgcacgtaatcgcgcaaggtctgcatgtactggtcgaagctcggttcgtcctgggcatagagctggagcacccacgggttctcgtccagttcatcgaagctgtcctgaagcgcgttttccagggcgtcgcgggcatgcgcgagccagccgggttcccggccttcggtgcccagcggcaccagctcgtagaaggcggccaccgattggccgtcctccaggagcatcgatttcgactcgggcaagaactccacccagggcagcagttccacgaaggacggtgcgacgtcgtacagcgcctgctcgtcggccacggtcgccggcttgcggccctggaccgcggcgccgggttcggggatgccggcttgctgcaaggcctcgacgtggcgctgccagccgtccggctgctcgtcggcggcggtgtcttcggcgctgacggcagccagcttcggccatggaagtttccaccgcatcagtagtcctccgtcctctcgccaggcatcgcgtactgcacgcgctggtacaaggggaaaaccgtcgtgtagcccggcacgggaacggggtcggtgccggccaggtgcgggtacacgtacatcacgagatcgggattgggcagacgctggaactggcggtgaacctcattgcgcgcggtgcgcgtgtagcgcatctgctcgacaggtgcggcctgcacgtcggcgtcggtcaggggccgacgcaggctctggcgcgcatcgagcaactggcggccggcgttccgtccggctgcgccaccgccgtcgccggcctcctgctgccagatgtccatcatcgtgcggtcaccgtgggtcaacagcttttccttgctggtggcgcagccggcgagcaccgcgacggcgagggccagtgctaggccacgggccaggttagtcaagttcaagggcatggctttctcctgcgcggtgatcgaccttgcggccttcgggatcgaagtcgatggcgagcggcttttcgaggtggacggcaaccttggcgccgggttggacatagacggcggcgaaggcttggccgtagagcttgttgacccaggccgacatgtcccggacaccgcccgcgagaatctggccgaccgcttcttggccggtgatgcccacggtgccgatggagccgtccgagccgacataggacatgcggccgctgccactctcgatgagcgaggccacaccggcaccggccgcggtgatcagggcctgcgagccgaggtattgctgggcgttgctgcgccgctcgccgctgacgcaaggaatgccgtggggatcgctgatccagcccaagccgtcgcgctgttggttgttctgctggttgccctcgcggtcttcggggatcgtgcgaatcgtgccgtcgttgaagacgaacgtgatgctgcgcacctgacctcgcacgcacgagagcgtccagtcgcccgaggcggtgccgctgaacacggcgccggccacgtcgggaatgtcgatgccattggcggtcaggttgtccggcccgaccagaactttgaacggatagggatcgttgaccgtgccgtcgatcggcacgcggccgatcagggccgtcatcgccaccgatcccattagcgtcgagttggtcggcacggtatagaccggcttggcattcttgaccccggcggcgcgggcgcccgcgttggccacggtttcagcggtggtttcgagcgtgctctgcgccgggccgaagctcgtggggaagctcatgccgccgctcgcgccacgccccccgttgcgcccctcggcgggctttgcgtcgtccggctcgacccaccgcacgccgccctccatgccggcctcgtcgccgccctgcagccccaggcccacgggcaggtccgcatggccgccgccgcgcccgccgatgctgtccaggcgccgctgcaggtcggcgagcagcccttcggtctgctggcgcgcgctggccgcctgctcttggtcgcggcgcaggttggaccgctcggattcgagcgccgagttgatgcgctggtcgatggagttctcgcgctggcgcagccgctggttctcttcacgctgcgacttgttgtccgagagcgcggtctgaagctcggtgcgcaactgcttcacttgggcaacgagcgtcgccacggtgtcgcgcggggtgtcgccttcgatgcccagcgccttcatttcctcgggcgtgagctgggcgccgttgtccgccacgggtggcgccgtgccgcctccacccgagaacagccggataccggcgaacagcaccaggatggcgacagggatcatcagccacttgagcaggccgttactgcgcatggcgggcctccttggcgttctcgtcgccgtccggctgcggcagatgcacggcagggtcgaagcggtgaatcgccggcagcagcgactgcgcgaggccgcggccgcgcgtgaccaggtacagcacggtcgtgtcctcggtcgtgccgcgcgggcccagcgcctcgtgctggaaggtggcggtgaggaaatcgccttgcagcacgcgcgggtcgagcgcgacccagtcggcgccggtgttggtgaggcgcacggcagtcacccattggtcttccaggcgccacgacgcgagcacggccgcgcgcaccggcagcgttggcatcagtgtgtccaggtcgaggtcgcggggaaggttgacccgcatgacgcccggaagcggctcgacggtgcgcagcggtgcgtagaggttctgcgcggcgaagcgcgtcagcacgacagggaccggagtttcgcgccgcgcggtccgcgcacctgcctggccctgggcgcgtgccggggcctcggcactgtcggcctgctcgccatagcgtcccggtgcgctgtcaccctcgacgatgcgcaccggctccagctcggcttccccgtccttgggcggttcggctgcgatgtccagcaggatcagcgcgcccgtgtcggcgtcctgcagttgcaaccgcgtgggctcgatcggctcgctggcacgcaggtacaccgcgccgcccgcactctgcacgcgcaggcgtttgcccacgcctgcgggcacgcccacgcgcacgttccggtcgatgaatacgatgcgttcctgaccgaccttcagcggcactgccagtggcatgcgttcccaacgcaggatctccaccgcctgggcgacgggtgccgcggccacggccagtagccccagcagcgcgagtacaggatgcttcatggggtgtttcctccttgaggcgcttgcggattcaggtcactcggcgccgggcgcgccggctccggtgcactgatgcgctggggcgcgccttcgtagcagtccagcgccaggccgaacgggttgcgggcgggatcgacgtccacccgcgtgaccttgatcggatagcgcaccagggcgcgtttgacctgctcggcgccgtagtactcgtccgccgtgatgtccagcgtcaccacccagtcgcgatcggatacggtgcgcacgcgcgccgtggggtcgtcgccatagccgcggccgggaatctcgtagatgccgcgcacgcgctgacgcagctcgcccgtggagcggcggtagtcatagtccgcccgcaggaaggcctggcaggacggggtgaggtacggcgagagcgtatggaggttgcgcgagtagtcttcttcgccattggtcggccagcggttcagcgtctggaacacgtagaacgtgaacgcatagaccgattcgggcggcacttcccaccacttgcgggtactgccagagcgcaggtcgggcgggacgtggatggtcaggtcgcgcggcgcgctccaccagccgccgcccatgaccagggcgacaatgaccagcgcgcccgcgcccaggcgcaaggtcttgatgtgcgcctgcaggtgggcgatctcgttcttgaagcggctcatcgcatgctcctgcgggtggaccagaagcccgagcgcgagatcagcacgtggccgcccacccagccggccatcagcggatggcgcgttgcgatgcgccactgcaactgtcgatacagccaggtgtcggggcgcccacgcttgaggcggcgcaggatgccgccgccgatgaacacgcccaaggccacgcccaggacaacgaacgtcggtgcgatggcgatcgtgcggaacacccacgaaagcggcgcgccgaccagcaggccggccgcgccggacaggccgcagcagatccacagctcgtcggcggtgaggccgcgcacgaccacgggatggcggttgagccggtgcggaaggaacgtgaccgtcccgtccgcacggacgtgctgctgctcggacataccggcctcgcttacaggatgccggtggcttcggtgagcagccagatgccgatcacgagcagcacggcgccgatggcgaccgtgaggccgaattggccccacgtcttgcggccggtgtggatctccgcgtaggtgccgtaggcgtggtagcagacgccgatgaacatcgacgccaccaccagcagggccacgagcatgatgatgtcgtagccgtagttgcggatggtctccatgatgccgttgccggtgccgcgcgtcgggttctccaactgcggcagaccttgcgcgaacgacagtgcgggcagcgcggcggcgcccagggccacggcggcgcgctgggcaaaacgggaagtgaggttgcggttgtgcatggtcgggcctttcatgtcaggacaggaggaagaaactcaggacgaggtacatcgcgacgaagcggatgcagacgccgaggaactggcgctggttgaggcggctctcggaccaccccacataggccgttcggatggcccagacgccccacacgagcaggaccgcgaacacgacgccgaccaggacggtcgccatcgcggaaggcgcgataccgctgttggcttgaaatgccgagacctgggcgccgttcattgctcgccctccgcagtcgtcttcggcgatggcgaagcggcccgctcggtgcggtagtcgccggccagttcggaggggtcgcgcggctgagcgcgtgatggcgtcaggtggaactggatgccggcgcgcacgcgcgccaggtcagccagcagccgtgggtaatcgaagtggtagcgctcgcccggctggatgggggcatgcgcggcgctgtccgcgacggtgcgttccagcgcgtcgagctggcgcagcgcggcgaccaactcctggcgctgcgccggggactcggccaatgccatcggggactggcccagcacgagggccgtcacgaaaaaagtgggcacgccgcgatgcgcggcgcgcagccagatcgaagccaccatcgcgccattcctgtgtgatcagcaatgggttgatcgtggagatcagggctgtttcaggccgcaaacaataggaactggcggacgaccggattgggcatgctgcgagcgaacctacaaaagcacgggtcgcgcttcgattattgcgtttttcgagtatttcgaatatgatcggctctgcaaccgttttcgcttaggagctacccatgaccaccgccactgcccaatccaagatgacccttcccgccgcgggagaggtgaaggcagccgtccagggtcaacgtgccttggcggcttacctcgcaacccagttcgagacgcagcacatccagatctttgatgaccacaaacaggctcatcaggtggaactgcctacctcggctttacgcctgctggtcgacatcctggccgagttggccgatggcaatgcagtaaaggtggtgcccgtccatgcagagctgacgacccaagaggcggcggacttgctcaacgtgtcccgtccccatttcgtcaagctgctcgaagatggggtgttggcatttcatcgcaccggcaagcaccgcagggtgaggttcgccgatctgatgcagtacaaggaagcgcgcgagcgcgccagtgagcaggcgatggccgaactcgctcagcagtcgcaagagttgggaatgggatacgaatgaggcattccccattcaccgccgtctacgacgcgtgcgttctatatcccgcgccactgcgggatttcctgatgtggctcggcctgtctggccgcttccgggcgcggtggagccaagccattcatgaggagtggaaacgcaacctgttgatcaaccgccccgatctcacccgggttcaggtcgacaggacgtcggatctcatggaccgggcaattccggacggcttggtggagggctacgaagcgctcgtggcaggcctgacattgcccgatccggacgaccggcacgtcctggctgcggcgattcgctgcggtgcgagcgtgattgtgacgttcaacgaacgggatttcccgaacgatctgctggctccgtacggcatcgaatcgcagcaccccgatgagtttgtggacaacctactggatctggacgcggccgccgtggtgtcggctgcgcagcgccagcgtgcccaactcaagcatccgccgatcgaggtggaccgctatctcgaaatcctgctgcgccagggccttgtgcaaacgaccaaggtgctggcgacctatcgcaccattctctgacccgccgagagccacggatgaccaagaatccttcatcagacgccactttgccgaaaggcatccatcgaagctggaagctgccggacacgtcgctgggcgccctgtgggattccatcgtcatggacgaagctctcaagaagcagttgctgtcacaggcgatcgtcaacttcacggtgcgccccaaggtggagcgcacggtactccccctgcacggcgtgatcttgttggtcggcccgccggggactgggaagacctccttggcacggggcttggcgcatcgtgtggccgaatctttttcttctgcgaagtttcgattgctggaagtagagcctcacacgctgacgagctctgcaatgggaaagactcaacgcgccgtggcagacctgttctcgcaatcgatcgcagaatccgcagcggcgggcccgacgatcgtccttctggacgaggtcgaaacgcttgcggctgatcgagccaagctcagcctggaagccaacccggttgatgtgcaccgggccaccgacgcggtgttggtgcagttggacatgttggccgaacgcaacccgcatctgctgttcgtggccaccagcaacttcccacaggccgtcgacagtgccttcctatctcgttgcgacatggtgatggaggtgccactgcccggcaaggatgcctgcaagcagatcctggtggactgcctgaatggcctggcaaagacatttccggggattggcaagctttcctcggctcaccagttcgacgcgtgcgctggcgagtgcgtcggattggatggtcgggccattcgcaaggtcgtagccaacgccctcgcggccgacccgcaagtggctatcgatccgaacaagctttccgtagagcacctgcgcagtgcgatacgacaggcaacgcaaatgcgccttcaaggagggaagcaaaaatgaccaccgttgtcagccggacgtttcgcagctcgccgcaccgcgatgcgttgcagacgtgggatgccattgtcgaactgctcactcagggcaaggacggcacggctcgctctgaactcagggccgtggcgggcgtggccgccagcttgatcgccgaccaggcacccaagagcgcgcccatcgttgcgacatgcgatggaccacggaccaggatctactgcctcttcgacgaagacgcgatcgatggtgatgatgccaacgaagaagtcttggggttcgagccgttgaagggagactggggagtctcgctgccgtgtccgaaggagcagctcggctgggtgcaaaccgcgctcaaaaagcacagttctcgcatcattgcacgggacttgagccaaggaattgccacgcaggcgcaggccgatgctggacaagcgctgtcgctcgacctcggaggtttcctcaagtcatgagcaccgtcgccacctactcgtacacgcactcggttacctatgtgaccgacaacatcctcaagagcttgaaagacatcatcctgctcagtgggctggaccccgagcacttcgcggatcgctgggagagcaatacccgagccatcaagacgtggctcgggaccggtgatctgcgcaaggtgattctggagatctacaacccggcaaccgacaaactcgtgacccgatgggatatcgacatcgtgtatgggtggtccgatggcgacggcagcttctggacagataccgagcagttgaagtacgcgatcaagaaagctgggctgctgccatcgcaggccaagtacaagttaatgctcgatacaaagccagggcggcctgatgtggaggggtggagcaaaggaagttatcgctcgacggatggaatggtcaagcagagcctaggctcgactgtcgaacacagcggcctggcgggtcaggccggatattggaggcaacgctgatgctgtcgatcgatgaagcttttcgcaagttcaagtcgcgtctggaactcaacgaacgcgaacagaagaatgcctcgcaacgccagaacgaagtgcgggactacctgcagaccaagttcggcattgcgcgcagcttcctgaccgggtcctatgctcgatacacgaagacgaagccgctcaaggatatcgacatcttcttcgtgctgaaggactcggagaagcattaccacggcaaggccgcatcggtagtgctggatgatttccactctgcattggtggagaaatacggttcggcggccgtgcgcaaacaggcgcgctcgatcaacgtggatttcggtgttcacatcgacgcggaggacaacacggactaccgggtggtcagcgtggatgcggtgcccgcattcgacaccggcgaccagtatgagatccccgatacggcgtccggaaagtggatcaagacggacccggagatccataaggacaaggcgaccgcagcgcaccaagcctatggcaatgagtggaaaggtctcgtgcgcatggtgaagtactggaacaacaatcccaagcacggcgatcagaagccggtgaagccctcgttcctgatcgaggtaatggcccttgagtgtctttacggcggctggggaggatcgttcgatcgcgagatccagtcgttctttgccacgcttgccgatcgtgttcatgacgagtggccggatcccgccggacttggcccggcgatcagcaacgatatggatgccgcgcgcaagcagcgcgcgcagcagctgctgttccaggcgagccaggacgcaagcatcgccatcgaccacgcgcgtcgtggtcgcaatatcgaagcgcttcgcgcctggcgcgcactgtttggccccaagttcccactgtcctgattccatcggcttccatacacgtcccatcgaggtacagcatgtcccagtggtcgctttcccagctcctgtcgtccctgcatgaagacatccagcagcgcttgtccgtagtacgcaagaccttcggtcacccgggtacgaagggggatgcgagcgagaacgtctggatcgacatgctggatacctatctgcccaaacggtaccaggcggcgaaggcgcatgtggtggacagcctggggaacttcagccagcagatcgatgtggtggtgtttgatcggcaatattcgccttttatcttcacctacgagaacgagacgatcattccagccgaaagcgtgtacgccgtgttcgaggccaagcagacggctgacgcggggcttgtggcctatgcccaggagaaggtcgccagtgtgcgcaggctgcaccgcacgagcctgccgatcccgcacgctggcgggacctacccagcgaagccgttgattccgattctgggtggcttgctcaccttcgagagcgaatggagtcctgcattgggcccatccatggacaaggcgctgaacgcaaacctcaccgaggggcgtctggacatcggatgcgttgccgcccacgggcactttttctatgaccaagccagcggcgcgtacagctacaccaacgaaaacaagccggcgaccgcgtttcttttcaagctgatcgcgcagcttcagttcagtggaacggtccccatgatcgatgtggaggcttacggtcagtggttgaccaagtgaggggtcgctgtggcaagcatacgttcggagtaccaccggttcctggcgcacttgacgcagcggcacgtgcacgacgacgtgcgccggctggcgcacctggtgctcgatcacctgcagccactggccgaggtcggtgctgcacgccgggggcgctccacgcgcttggcgccgctggccatcgcgcatctggcgcagatgcctgtcgcctacgacggggacgcgcgcggccccgaaaacgggccggcgctcgggcgactgcaccagctcgaagtcgggccgtttcgaggattcatgcggcaggagacgttcgacctcagccatgacatcaccttggtctacggtgccaacggcaccggcaagagcagcttctgcgaagccttggaagtggcgatgctcggttcgatcagcgaagcgcaggccaagcgggtcgaccagcggacgtactgcaacaacgctcgcctgcgccgccacatcgcgccagtcctgtcgtctacggcggcgggcgaggcgcaggccgtccagcccgacgaagctgagtatcgcttctgcttcatcgagaagaaccgcctcgacgatttcgcccgaatcgccgcgcggaccccgagcgatcagcgccagctcatcgccaccctgttcggcgtggaccagttcagcgagttcgtgcgcggcttcaacccctcgctcgatcaggacctgatgcttgccggcgtgcaggcggcgcagctggcgcagcgtcgcctgcagttggcgaactccgaacagaccatcgccgcctacccgcagaagatcgcagcggtcgagggcctggaacaagctttggcgcagcgcatgtcacctggcgcgacctatcaaacctgcgtggactggctgctgggtacgccgcagcagcaaggacggctaccgtatgtccaggctcagctggacgccaacccgcctgccattcacgaggtgacccaggcccgcctgcaagcgttgctggcagaggcctaccgcgtccagggactgtggcaagcgtcttccgcgcaactcgcggcccgcgccggcgaggtgtcgtacgcgaagctctacgaggccgtgcaagcgttggcggacggggcgaccgcgtgtccggcatgtggaaccgaactggccgccgtggcgcaggacccgttcgccagggcgcgaatgggcctggagcagctcgcgcaactggccgtcctgcagcagcaggaggccgggcatcggacgcagttgagcgaggcggtccgagcgctgtgtgacgaaatgcgccgcgtggtggcggcggctggggtcgcttgtcctgccgaatcgcaggccgcgggcctgccactgctgcctcccacgtcggcgggcaattggctcggcggcggggtgaatggggaccagcgcgcctggcaagccctcttacggatcgcacagatcatcgaaggcttcgacgcgcaggcgcgcgacgtgaatgcccagcgcggcgcgatggcccaggagcgggaccgcctgcaacagcatcagctggagatcgaacggctgcggaccatgcgcacgactgcggatcaggagctggcggccgcccgccaaaccgtggcccaattcgacgacgcgaaccgcggcctgatccaggcggccacggacgaaatgccggtggtggtgcaccatcagcgggtcaaggccgcctacgacggcttcctgcccgagattcaggcatacctgaccgctctgccgggggttctgctacaggggctgggagaccaagcccgccatctctacaacgcattcaaccgggccgatccgcccggcgatctgctgcacgcgctgtggttgcccgtggccgagaacggcaagatcgaggtggagttcgccggcgagccgggcgcgcgctacgacgcgttgatcgtcttcagcgaagggcacatcaaatgcctgggcctggcgattctgcttgccaagaacctcgcgcagggctgccccgtggtcatattcgatgacgtcgtcaacgcgatcgacgacgaccatcgcgatggcatctggcgtaccttcttcgaggacggtttgctccacggcaagcaggttatcctcacctcgcacgcagaggagttcctgcaccgcatccagcaggagttgggcgtgcgccgcgccgcggccattaagcgctacaagtttctcccgcatcagggagagcacgaactgcgggtcgacagcgacccgccagcgaagaactatgttcttctggcccagcaggcgttggcggctgacgagaaacgcgaggcactgcgtcaggcccggccggcgctggagagtctgacggaccgcctgtggacgtggctgggtcggcgggcggacggccggatcgacatcaagctgagcgggccccgcgcgccttgggagctgaacaataaatgcaccaagttgcggtcggccgtcgagcgtatcgcggcgcaacatgcgggtgcgccggatgccgtaggggcgttggtccggctgctcaatgtcagcggtacgagtattgaatggggttacctcaatagcggtgtgcacgacgctcagcgcgatcatgagtttgatcgggcgacggtaagaacggtcgtcgaggcggttacggcgttggatgctgctcttgataccctgcagaaccgatgaacggcacacggctttgcagagccgtgccgcccgtgtcacctcataagtacttcttgaagctgcctgcggtcaggctgactgccatccccagcaacgccgcgctgggcagcaggatgaccagaggatgcaccgatatgggcagagcgagataggtgacccaaggcagcacggccaacggcatcaggctggccttcgcgcggtggtagatgaagccggattcgcggcccgcgccgaaccggcgcacatcccgtcgcaccaggccgtcaatcaggccgacgaatgccgccgtgaggatcagcggcagcgtgagcaccaggaccagcaggcgcaccaggaaggtgagcgtcgtgaaggccgcagcgatcaggtagctttcggcccagacatagacttggctgatgtagtagcggaagttgcggctctgcccgtggctgggcgcgcggacgcgctcggcggtctggctcatgcgctccagcaaccccgagcgcacgaacacccactcgtacccggtatccaccaactcgtgcgccgtgcgcccgggctcctgtaccaccacgctgcgcgtgaagtggttggacaggtgcccgagttcgtaccgcagcatctgctgggagtggcgccagccctggtccttccagaacaggtgcatgccggcgcactccaccacgatcgagaacagcagcgagccaatgagcaccccgagcagccggaacggtaaggtgatggtgccgacgatcaagccttggcgatggttctgctcccgctgcgcggtcgaggcggcatccttcatggcacggcctcgttgcccgcgccatcgtcggcgccggtggccaccgcgccgggctcggccgcagcggcatcgtccagcaggtcgtcgggcaaggccgcatcctgcaaggccgacgagctggtgaactcccaccactgcgtggcctcgctgtagctctggcgcatgtacccggccagttgctgcaggtccgccggcatcacttcatccgggtccggcgccggcagcggcatacgcaccttccagagctggccgccctgcagcagcgcgaagcactggcccttgggcaggccgacgacgtgtgacggctcgatcatcggcacgctggccatgctgatgcggtcctgggtgttcgacgtgaaatccgtcgcgccgcggatgtctgagctgtccgtcgcgcccgagacgatggtggttgtatagacctcgaccttcggcaactgcctcgtcagcagttccgcggtggccgtctcgcgcacgcgcaacatgaataaattgttgaaattcccgatcacttggccggccttcgcgcgatttccgatgcgggcctcgatgtccgagagcgtctgcgtgtacgccgtgacttgcaggccggcaccgccgcccttgttgatgagcgggatgaattcatcgcccatcagttcattgaattcgtccgcgtgcacgttgatcggcacgcgagcgccagccactgcgccgggcaggccatcgtcgattccgtgcttgtagatgtgtccggccaccgaaaccaggtcagagaacatcgaattgccgaccgctgcggcgacctcggcgtcagacaacgcatccagacccacatagacgatggcccgctttcggatgacctgcatccagtcgaagatcgggcgcgggtcggccaggtcggagtagttcggcgccaggagctgggcgatcttgccgctcgtgagcttttccagcagcggcagcagcgatgcaacgatcttgtcgaagtaggtcttgtcgtagcgcaccgccgagcgcaggccatcgagcacagggtcgtagttgcgcgcctgggagaggtattgctccagcgccaccacacgcttctcgcgcccgatcatgttccttgggatgttcttctcgttgagcttggcctcgatctggacgatcacctcccaggccttgggctccgtcttggcaaagtagtgctgggcgtactcaatgaacagcgcgtcgatgttgatgacgtggcgctggatcagcatgtagtccgggcgctgccccagttccaccagggcgcgggcgatgatgttcacgaagcgccatgcgaactcgcggaacgccgcgctgttgccttcgccggagagctgccccgcgatgcgtgtcgccacttccgagatccgaccgaagcggcccacggcgttgtagcgggcgctgatttccggccagcccaagtggaagatgtagaactcgccttcgcggccagcgcgctgggcttcgacgtacatccgtttcaagagatcggcatcccccttggggtcgatgacgatgacgacctcatgctcgccggcagcattcctgcgacggatgtcctgcgtgacgaacaactcggccaggcgcgtcttgcccacccgcgtggtgcccagcaccagcgagtgcccgacgcgctcgcccagcggcaggctgacgtccacttcgtcgggctcgatgccgtgcagccttggcaggccgccgacaggcggcaacgggcgcacggggttgaaaggcgcgtcccagccggtgagcttcggcaggcgcgagagcggcaatggcgcgaactccagccgttcctccaggcgcctggtcagccggtaggccggcgtcggctcgacgtagcggcggaactcgggccggtacgtctgcatcagccgatgcgtgtgcttctgctcccagagaaagccgcgccccacgaataggcgctgctggctgaccggcacgtccttgctggtcatcacgtaacgcggcagacggcggatgttgcgccggtagcgcaggatgatgcgggcatcgcggtagcggatcgcgccgtaggcgccgaacgccaaggcgctgccgatgcccatggccgggctcagcgcgagcgaccatggggccaccaggcacagaaacgcggcgcctgcacacgccgcgacggtgtatagctccaccgctgggcgtagcagaacctcgaccggctgtttgcccgacatggcttcattgctcgatgccggtggccgtgatcagcgccgggtagtgccgcaggcccaggcgatcggccaggtcgtcgccggccacgggcgcgagcggcacgcccggcaccagggcgcgcagccgcgccaggccctgcgcggtctcgacgttgacgaccaggccgaccgcgccacgttcgcgcaaagcggcggcgcggcgctgcaaccaggcccgggaagcctcgtcgtcgccgatgaccacgaacggccgcaggccgggcgcttcgatcacccgtcgcgcgacggtgccgggcgtgagcttggcgctgcgcaccggcagcatcgcggcttcgtccgcccgtgtggcaggaacctggggcgtcgggatggacggccgcgccggtgcgttggcgcgcggctggagattcagggcttcgtagtacggcaatgccgacgtgccgccacggtcctcgacaacgatcagtggctcgccggcacgcgaggccagcggcaggcctgacagcagcatgagtaggcccgtgaacgcgagatgggcgggatggggtttcgtcatggggaggtctcctggcgcgccgcgaggaccgcggcggctggtcgcgtgccctgcacgcgggcaaggtggcgcgacacgctgcgccgatagcgggcggcgggctcgccgcctgcggggcggtggtagcggccgatcgccagcagccagtcctcgccgggggtgtgctgctccttcaggatctcggcggcaacggccaggttgcgatacggatccagcaggtcgcacgcgccggtaaagcggtgcttgtggtagccgaggttgatctggcccaggcccgcatcaatgcgcgtgtgcggcgtggcgcgcatcgcctgctgcaggccagcgcaggcgtcggcgcgcgtggcgaagcggcgcgactggccggcgacgttgagggaccacggccacggcaccaggcgcccgttgcgccggatgccgctctcctgcaaggccacggcgtagagcacggtcgaggggatgcctgcgcgctgggcggcaagctggtaagccggtggcggaacctcctgggccagggcggcaacggcatacaggccggcagtgagcaccagtgcgcgcaggggcatggctacggctggcgctgccattggccgttcacttcgcgcacggcggcgggcagatcgccgggcaggcccagtgacagccagcggccgccgtcgtggttgagcgtgatgctgccggcgcgcacgcgcgccgggtcgatctgcgcgcgcttggcccagtcgcggatgcgcgcgtcatcctggcggctgcccaccatgtacaggtcgaactccgcgcccgaggattgcaggcgctgcacgagctgtccgcaggctgcgcagccgtccttgacgaacaccgccatgcggccgctgccgcgcaagggactgctggatgggccggcgcccggcttgtcgtcgggcaggttcacgcgctgcatccccggattcaggcgctgccaggcctcgtcgtaggcgcgctggtaggcgagcagcttctcgacgcggcgcgcttccacctgcacctgcagttccgcatagcggcgccgttcttcgtccgtgcgagcttcgatgcccagggcggacagcgggtccaggttgggcgagtagatacccagcggcccatccatcagctcgcggtagcgtgcccattcttgtggctgcaagccccattcggttgccacccggtcgtccagcacgcgggcggccagcgggcgctcctggctctgtgcgttgcgcgccgaggtcgttgcgggctgctgcgcccaggcgggccattgcgacgacgccaccaggaccgcgaaaaggaggatcgacggcttcatggggtgctccggtcagggaatcgccacgcggcgggtctggttgccggcctggaacactgcggtgttgccctcgatcgcctgcaggcgccacgggccgaccgcatccccgggcagcagcacctgaagttgggcgggcgtgaagtccccgatgctcggcgcgacggacacgctgcgctggccggcgcgcagttcggcgccgacgacgcggaatggcagcggcggcagctcggtcttggaggcggcggacgtgcgcgatgcgcgccgctgggcgggtgcggtggcacgcgcggcggcttggcgcgccttgatctgctcgacctccgcgcgcagcgcctggaggtcgtcggccgctgcgtagccactgagagatttctcgacctgggccgcgcgtgcttccagaatctggcgggtgtctttgaggtcagcgtccgtcgcgacggccgggcgctgctggatggcctcgatcgtctcggccaagccagttgcctgcgcttccaggcgttgcaggcgggaatccagccgctcctggtcggcctggtcgctgagggcctggtagcccagggccgccaagacgctgaggaagatcaaccagagccacatcaggctctgcaccaccacggcggcggtcgatcgctgggcaggttgcggggcgttcatggctggcctcccgaaaccatgggtgccagcgggaacgtctgcaccgcctcggtggcgggtggctcggatggggactcggcgaccgcgcgatcgccgggccgctcgaagcagatttgccgtgcgcggtcatccgcgtgcagttcccaggccgggccagccagcgtgagcagcgcatcgcgcaaggtcatggggccgaggtgcaggtgtaccgccggcaacggcagcgcgtacagctcgatcacggcatgcgcggtctggcacaggccatagccgctgcgtttgagcacgtgccgaagcccatccccgaccgtggcgcgggcatcctcgggcatggacacgtcgatggtctgcaacaacaggtcgcgctgcgccgccatgggtgccagttcgaccagtgtgtagcgggcgtagcgcacgaccgggatgtactcggaagcctcgggttcaggcgcggccaagacttccgcgatggtgtcgggcgcgaccggcgcagtcgtcgtcgcgcagccaccggccagcaccgaccacagcaggccgagaaatcccgccagaaggcggcgttcgggatagtgaaaccacggtggagaggggcacatagctcggcgtcctgaaacatccagccctcaccatcgccgctcaggccgcgagcggcagcaaacaatgcgaaccaggcagcgtccgatttaccgggagcggcaaaaaaaacggccccgaagggccgtaagtggaacgtgtcatgcggcgacaagctgccgggccagtgcgacctcgacggaatcaccgtcctggttcaggacatcgagcccggattcgggcacgtcgcccgaggtggactgcgagaccatgatcttcttggccatcagctccaggcaggtcatctgcgaggaaccggcgtagccgaggtagatcacacgcacgggctgcttctgcccgatgcgccaggagcggcgtgccgcctgctggagcgagtacacgttgtagcccgactgcatgaacacgatcgtcgggaactccaacaggtccagccccgtcttgaccaactcggggttggtgatgagcacgtcgatgccacggtccagttgctcggcgatccagtcttcgcggcggctggcatccacgctcgcgcgcagcaccgccaccttgaagccttcctgctccagcaacaccttcaggcgcgacgtggtgtcgcgcgtgccggtatagaccgtgtaggccaggaccttgcggccctgcgccttctcctctttgcagatgtcgatcagctcacgctccttggggctgatctcgaactcgttgaactgagccgggacaaacgccaaggtgttgcgcgtgcgcggatgcaccacggtctccgaccggaagcagcaatccggccaggccagcagcacgttgaggaccacacccagcaaggtcgtatcgcgtcgcgccagagcctgtttcagctccgcggtcagccgacccgccagatcgcggtaggccgcggcttgcgccgtgtccatcgcgacttcacggaactcctcgtcatacggcggcaggacgttgccaccgatgtccttgagcttgagaaagatcgtgaacggcaggatgcagcgcagcacgcccttggggccaaaccccggggccttgaccgtgcgcaccgataccttggtgcccttggccgtcttgtgcgccgtgccggtgctctcggagtagatgtccttcaacaccccgtgatcgcgcatgaacgccatcgcagccgaggtcatgctgccgctcgtggtcgggcggtagccgtcttcgatcatccgccccggaagggctcggaacagcaggtggaacaggtcgtccccgtagccgcccatcaacgtgccggtcagcagcaaggtcttgcgagccttcgccgccagcacgcccatggcctggccctgggcactgcccccgttcttgtactcatgtgcctcatcggcgatgagcaggtcgaacgtgccttgcggcaggtagcgtttgatgaactcggacggctgatagccgccctcgccaaagccgaactccatgttggccatcgcacgttccatgcgcgtggcctgacggtcggaaaacaccagctcgccgttgccatccatgaggttgatgaactcatggatgttgtcgccgagcatcgacgccaggaacccgtcaccgaacttttgcatcagcttctgcgcggtgacctctccgatggtcggtatgcgctttaaggctttgagcacggccgaggactggtcgctgccggacagactgcgcgggcggatcagtgtccacaggggcgcggcgcagtggccgcacttcctgcggcactcctcggcttggagcgcgatcgggttgaccggctcgccgtcgaggtcggtgatgaccgtgccgcagtccgggcaggccgccacgtcgccgtggcgggtgcgccgcgtggtgaagacaggcttccagtgaaagcccatccgcatcctgacgcgccccaggacgaagaactcctggcccgtgggctgcacgcccaactgctcgcgcagcttgatgagcttgacgagcgtatccggcccgttgagtacccacaccttggcaccggccaccgtctcctggatctcgcgccgccacttgtaaaccaggtggggcggcgacagcaccagagtgcggcgatagccttcggcgttgagcacggcggccgtggcaatgccgacggtcgtcttgccgcagcccatctcgccattgacgatcgcagcacgttcgccacggtcgatcagcagctcggcggcggcgtggacgacttcggcctgggctgggaacagcttgcgcttgaggctggcgaccaccagttgccggtgcgcctgcggttggccggtatagaccggcggattagcgctgttgagggcgtcgagtagttcgtcgccgaactcgccgacaaaatcctgaaggctcagggtcagaggggaagattccgcgtcgagcagttcgccctgtacgggcgcggattcagcggcagtggtttcgagatcgagggacatggtgatgctccaaagaaaaatggggcatgcaccacccccagcggggcaatggcatgccccgtggtgggaagagaatcgacgcgtggctgagggtggttgaaggtgctggcctgggcggcccgcaggtgaaccgtgctcagtcttcggacggaagcacgatgacggttgcgcagcgctgcgaatcggtgacgatgcgaatggcgagccccggatggatcacgtagtgcgattccagcgacgcgcccgattgaagcgcgctgctgttcgtctgccattgctggatgttgacgtcgccccagtcgccacgggtgtggcgcctgaagtacgggatcgggtccaggcgacccgcgcggaccaggcggtctacacctctgctgaagatgagcgccccgatggggaacgccagccgctggcagtaggtttcgatgcgatgcgatgccatgggctcctccttgatgagtcattgagccacgacacccctgccggagtgaagtggctccgtcaggtggatgaggatgacgatgtggggcctcagatcaggtcccgctcttcgggaagctggaccaccgtggtctggtggtcctcgctggtcttgacgatcagcgccaggtccggcgtgatcctgaactgcgagatcattaggttgtcctgttggatcgccacgtcgttggcttggcgtgtggcctcatcgatctcgccccagtccccgcgcacatggcgctggacataggccaaggggtcgatcaggcctcgccgggccagccaatgcaccttctcgctcaacttcaacgtactcggtgcgaacaacggttgcttgtgcggcgcaggccgcttgaacggattggggatcatggtgtttctccttcgagttggtacagcaggacggcagcgcgtccggtggatcagcgaatggtcaacacctcgccccgtgtcgcggagccaggtgtcatgtcccacgcgcggatgacgggaacgaacttgtcggtgaggatgcgggtctcggcgatggagccgtcttcgcgttcggtgaactcccgctggagcgtcttgtccttgtgggtgtcacctttgacgacgagcacgcgcccggtcttggagcgcacaacccccgagatcgcacccgcggccagagccagggcgagatgccagcgggacaaggcccgcgccggtggacgcagcgattgctgcgcagcccccaggtgcgtgtcctgcgatggccacaagccttgcagcctgccaacctcatcggcgaactgctcgggctccatcgtcacgcggaagaaatgctctggctcggccgggctggcggggacgatgtacggcaggaacggccactcgctcggcagttcctcggcttcgacttcgccttgccctacctgcaacagcagattgcgcacggccttgacgccatcgggcacctgctcgcgctggcgcacccggcgtccgaagatcaccacctgcttgaactgcgtctccaccgctcggtagatgcgcaggtccgtgtagtggcgcgtcagccagccgaccaactccgcgtcgagcacgtagccggggacgatgaaaaccagcacgccgccgtattgcagcagcgagagcgtgcgctggtagaacagcttttcaaggcgggcacggccctggccctgatagccgatgttgccgttgacgtccttggacaggtccccatacggcgggttgagccagagcagcccgaaggactgcttggagaccatcgtgtccatcaggtccgcgtgcaggcagtgatcgaccaggccgcgggcatggcgcgcccgctccgcgtcgaactcgacggcgaacgcctttgcctgctcgcgcccgagggcatgggcggcttcggcgatcgccacgccttcgccggcgcagggatcgaggatgcacatcggcccgtcgctgggcatcagtgcgttgagcgctctttcgagcgtgggttcgtcggtcgggaaatatccgttcttgacgaaattgcgggcgagccgcgggaacatgagggccatggaagtctcctggttggcggggatgaaggacggaagcacgcctgcgcgtgcctccgagggtgggtcaagccgttaccgcttccgaggtccaaatcttggccggatagggataggcggtgagcgcctcactgcggatcagagaacccagcgccagggtcagcgccggcacgtcgatggcgagccgatggccttccaacggcccgagggcgaacggaaggcgggccagcatctcgcggctttgcagcagttccagcacggtctcgcgccagtgatcgagcagcggcaatgggcaggtgtcccgcaccagcatccacaggcggtcaagcctgtgggcgctgtcgcgtggcagcagtgccaatgcgctggcgttagccttgtcgggcttgacgcagcgccggtcgaacagccacacgttggacagcgaaccgaacagcgttcgccggtaagcgcgcgtgatgcgcttttccaggcgatcgacgttgccgacgaacaccgggacgctgccgccctggtcggtgaggacgtggaactggtccagtccctgctcgtcgcgcccgagggtcaggcgagcgaggaactgctggacggcggtgtcccgcgcccagatggacaggaagaccaggttgccctggtcatcgccgacgcaggcgtcggccatcacgtccgggcattcgtcgatgcggtacagcgtggtggaagaagtgtgtgcgggcatggtggtgtcctcggatgaacgggaacagcaccgccccctggggcaggtgctgccccagggagtggaagaaaatcgctcagtccggctcgaactgccgggtgtgcgggttgaagtgaagtgcctcgtccaccgcggtgatcggcgtgaagccgtccaggtagatgttgttgaggtactggtcgcggtaggtcagtgcctgccgcgcctgttcctcggtgaggccgttgtcgatgaagtacgccagcatctcctcgtcggaggagacttcgtcgttggacaaactgccttcaacgagcttcaacagcgaggcggggagcacagccaggatcgggtccatgtcggttcctcctggctcaggccatcagtgtcgcggcgggagccgtgacagccgtgggtgtgcgccgtcgtgcgtggtaagcgcgaacgcctgcacgccagtcggcggactgctccggtgcgaggtccagataggacagcgggcacgagtagtagtacgggtgcatggactcttccagcggcttgtagccccactggccgccgctgcgttcaagcagatcgcagcggatgaagcgcagggactggcccggcgccagatcacgatgcacaccttcgaccttggcggtcatttcgaccacggaccacagcacgttgccgcgcatcgcatgggcgatgacctttgtgctgacgcgctcggtttcccgcggttcgatcagttccgcgatcaattcggatcgcgattggtgagagaaataccagcccatgagaggcctcctcgaaaagttgagccggaggcctccccgtggggaagaacccccagcgggtgatggaatgccgcaggtgcggtgaaggaacctatgccttgccctcaatcccagtcgtcatcgtcgcgatcacaaccggccgggcagtagccgaactcgatcccgtgcgagcaatagccatgctccgcattccagtcctgggtttcctgccgttcggcaggtgttgcgtagtcccattcctgggccgcgatttcgagagcctgagcacgttgctcatccggcaaacgattggcctgtgcgtcgatcgccgaactgaagagcgtcacgtagtggtcgtaggacaagccgcaaccgcgctgggcgtgtgcggcggccgctttgcaaaggtcccgccacgcgggttcatccagcgttgaacgcggggtatcgcaagcgatggtggacatgatggagacctccagaaaatggccagggcctcccccgcatgggaaaggaaccccggcgggtggatgaagaacaccgcgcatgcggcgtctgcgatcacgcaggttttggttcggcctggcggctccactcctgcgtcttgaagtccagcgcgtagcccagctcgcccaggcgggcgatctgcgcgcgcagggtgcggcggtcgatggtcgaatccagtttcacggactcgcccagcggccacagcaggccgaagagcgcggcgtcaccgtcttcggtgctgccgggggcagcggccgtagcaggcggtggcgcatccacgccgaagggcgtggtatcgaccagcgggtccgcggacgcctgcacgggtgcgggcttggcgggcctggacgctttggtgggcttggccggcgttgccgcaggctgcgccccttgctcttcatcgagcggatcgacgtcctgggtggcgaagctgcgggcttcgtcgcggctgagtttgtcgatgccgttgagcgtcatgccgtcgaggctggcacggatctcgaaccgcatgccgccgccgaccggataggacttcgggaagatgtacctgatgatgaattccccgtcgtacttgccttcggggtactgctccagctccgggtctttgacctcgaaagtaccgaggtgcgtcgcgaggcggccaaccgtgaacgggccgttcttgccgcggatggtacgcagcgtgagctggccggggacgacgatgggcgcaacagatttctcggaagccgatggggttgccatgagggttctcctgatgatgaatgacgggccgccgacggcacccggtggatgagaggaaatggcctcgcccgaggtgggcgaggtccgcgtggcatcacgccttgagctggcgcatgccttcggccagcagccacaacgcccggttcaggcgcaggttctggtcgatgccttgcaccggacgggtgcgctgattgcggccgttggccgtgcgtccgttcaggccccctttgactaggttctcctggacgcggttgaagacggcccacaggtcgttcttgcggtcgtcccatcgccgaggggccagcagttggctctcggtgacaggcgtggacttggccggatcgtcgtacttgagtgcgagcgcagagttcgcaaagacctccgcttcgccctcatcgagggtgatggtgcgcatcgcatcgcgcgcgttatgcacgcgctcgaaaccttcgaggactccgtaggcaccttcgatcacctggctggccacgtcgcccttgtggggaacgcggatgtctgcggtggtgtcaccgcaaaccaggccgttgtggcagacgaaccggaacatgccggcgagcatctgatagctgctcgtgccgtcatggctgttgagcaggatgatctcgttcgcctcgtcgccgttgatctggcttgcatggcgaagtcggatgaggtgcttcgtgtactcgcgccggtcttcgttgcgcacgcgcgtctgacacaccatgaagggctcgaagccctcctggcgcagcttggtcagcacggtcgaggtcggtatgtaggcataccgatcggaccggctcccatgtggagcgtcggcgaagatcgacggaacgacggcacgaatgcggtcgtccgagagtgggcgatcagagcgcaggatcggggattgcggagcaaagcgggataccagagacatggctgatctcctttgagaaattcgacaaccgcgtggccgtgagaccacgcggaactcgggggatgaaatgcgcaagcacgcgtcctggggacgcggcgtacgtggggaggaaaagcgacaaggccccgtgagaggccgtgccggatcagaacgaagcagccaatgccggctcctgctcctggacttgcgcctcgggctcgcgctcggcgggctcggtggccgtgtcgatggcatcgtcggcttcggacgcggatgcgtcttcggccggcggcgcctcggcttgcgcctggctcgtcggatagacctgggtgccgtcgatcttgatgagaccgatgtggaccagcgtcgattccaggctggcggccggttccccggcgtgctcacccttggtgcggatgtacggatcgatcttcatgtcgttcagacggaaggcgatcagcaccttgcggtcaccctcgacggcctgaacgcaccggcgaaccaggtgctcggcttccggggtggcgacgatggtgtcgaagtaccgatactccggttcatcgacaggcccggccagtgccgcgacggtgcaagagaggaacgagtcgccagcttttggggtgacgtccttcacacgattgagatagccgatgccgcgggtgatcaactcgtgctgctcgatcgaagccagttcggcccggtcgatcagttcggccttgagcagtcgcgccttgagggacgcggcggcctgacccttctgctcacccttgtcgcggatgtacacatcgccccacaggtcaccgaggcgaaagcgcaccagcgggcgctgcttgggatcgtcaacgccgatgtagcgctgaacgagcttcttggcctcggcacccgagaccttgacgtcgaagtagcggtagctggggtcccgggcggggccgaccagcgcggcgatggtgcatgccaggaaaggctgcgcacggcggccgccccggacgggcacttcacggacacgctggatgtagccgatgcccgaggtgtggaggtcgaaatacgatttctcgttggacgtggtgttcatggtgaatctccattgggatgaagcggagacacaccggcccacgcatgcggggaaggtgcgtgaccccgcggtgggttgataaggcgaaagcatccgccaccagaggctggtggccgctcgcggaaggatgcggtgcgagctggctcggtcacgcagtgggaactgcgccgcaacctcgaagaccgatggttgcctggcatgtcgctgacgacgtcagcaggcatggggccagcatggcggggcctcgcgcgcgcggcagcaatcaatcggcacccgggcgcttccctttgtccgcgccacccggcgcctgtcacaggcacttggcgccgcgcaggtgctcgggggtatcggcgcgcggacggccgggacggctccaggcgccgccaccgcgcgcgccgatcagccgccagccggcggcgcgcaggctggcgccaccttcgtcgggcatggtgtaggtgagcaggcgtatgtagcccagcgcccttgccgcctgccaggccgcgccgtagagcttgctgcaggcgctgggtgtgccgtcggtgcacagccgcgtgacttccagcgtccaggtgccgcgcgaccgggcggccgacaatggccacgccgtggatcaggtcgctgtcgctcagcgtgacggccagggcgaacttcgcgccctggaccgggcggtggtggcgatggtgcgacagaacgaatgcattggccgtgcgcagcgacaccggtaggaggtgcagcctcggcgaggtcgatggcgtgttcatgcggttgtctccggtggcatgccggcgttgtggccggcggggcgtgcctcggcggctggagacaaacgcgcacgcgcggcgatggcggcggtgcgaacaaaagaaggcccccgatgcgggggctgcgaggcggttgccgcgtcaggcgggaggcaccactgctaaggacaggtgcgtggcggtggcggaaagcacgagatcgtccgccgagtgctggaggcgcgtgaacaggccgtccttcgggtcgaaatactccgcgaagtcatcgccgcccagctcgcggccggcgaggtgccaccagtcatcgaacgggtcggtgtccgggttgcatccgacggcgtaggcgagcagtgcctggcgcccatccgggcgacgctccccacgctcggcgaggaagtacacgccctgatccttgaccaggacaatgcggcactgattggggacgtctcagaaaacggaaaaaatcgtacgctaagccggttgcagcggtcgtagcggcctgaacttgcccgcgccgatcttggcgctgctgcgccagaggtaatcgccggtcaggttgatgtgctcccagcccagcggcgacaggtactgcaacagggcgtcatcgacagtctggccgtgaccgcgtaaggcgtttgaggcccgttccagatagaccgtgttccacaacactatggccgccgtcaccaggttgaggccgctggcccggtagcgctgctgctcgaaactgcggtcgcggatttcgcccagccggttgaagaacacggcgcgggctagcgcgttgcgggcttcgcccttgttcagtccggcatgcacgcggcggcgcagctcgacgctttgcagccagtccaggatgaacagcgttcgctcgatgcggcccagctcgcgcagcgccacggccaggccgttctggcgcgggtagctgccgagtttcctgagcatcagcgaggccgtcaccgtgccctgcttgatcgaggtggccagccgcaccttggcgttgatcgccttgccggacgcctggaactgctgctgatgcttgtgcttggcagcgttgaacagcttgcccaggatgcggtcgtgcaggtcgatgatttcgtcggtgacggtggccatgccctcgatggcgagcgcaccagggtcgcgtagcggcgctgtgcctcgaacttggccagatcggcgggcgtcatctggccgccttcgcgggcgatcttgagcaggcggttctggtgcaccgaccgctcgatgccggaaggcaggtcgagcgcctgccaggctttgaggcgctcgatgtgttcgagtatgtggcgcgagttcggcttgacgggcgactggcgcagccaggccagccaggtcgtcttgccgttgtcgtggcgcttgagcagatcgtcgaggcggtgccggtgggtggccgacaggggatcggacaaggccgcgtagatgcggcggttggcgcggctgtaggcgttcatcgaacacctcccttttcctcatccggcgcaacaggacagttgcttcacgtccttgttgaaggtctgcgccgcgagcttcagtccctcgaccatggtcaggtaggggaacaactggtcggccagctcctgcacggtcatccggtggcggatcgccagcgcggccgtctggatcagttcgcccgcttccggcgcgaccgcctgtacgccgatcagccgccctgagccagcttccgccaccagcttgatgaagccgcgcgtgtcgaagttggcgagcgccctcggcacgttgtcgagcgtcagcagccggctgtcggtctcgatgccgtcgtggtgcgcttccgcctcgctgtagcccacggtcgccacctgcggatcggtgaacaccaccgccggcatcgccgtcaggtccagcgccgcgtcgccgccggtcatgttgatcgcggcgcgcgtgccggccgccgccgccacatagacgaactgcggctggtcggtgcagtcgccggcagcaaagatgtgcggtgcgctcgtgcgcatggcgcggtcgatgacgatggctccctgcgcattgacttcgacgcctgccgcttcaaggttcaggctgcgcgtgttcggcgcgcgaccggtggcgaccagcagcttgtcggcgcgcacttccccctgcccggtggtgagcacgaattccccgcccgcataggcaacgtggctcgcctgggtgtggtccagcacctcgatgccctcggcgcggaaggcgtctgttacggcttccccgatggccgggtcttctcggaagaacagcgtgctgcgcgccaggatcgtgacctggctgcccagccgggcgaaggcttgcgccaactcgaccgccaccacggaggaaccaatcacggccagccgctcggggagcgagctgctttccagcgcctcggtggaggtccagtggggtgtgtccgcaaggcccgggattggcggaagcgccgggctcgcgccggtggcaatcaggcagcggtcgaagttcacctcgtgcgtgccgccgtcagcggtcgccacggtcagcgtgcgcgtgtccctgaaccgggcctcgccgcgcagcacggtgatggccggagtgcttgccaggatgccttcgtacttggcatggcgcagctcctcgacgcggccttgttgctgggccagcagccgctcgcgcagtacagcgggcgctgcggccggcaggccagcatcgaacgggctttcgcggcgcaggtggacgatgtgcgcggcgcggatcatgatcttggacggcacgcagccgacattgacgcaggtgccgccgatggtgccgcgctcgatcagcgtgacgcgggcgccttgctccacggccttcaaggcagccgccatcgccgcgccgccgctgcctatcacagccacgtgcagcgcttgttcaccgccaacatgcttcgtttcgccaccgagccagcccagcgccttgtctagcaggccggcaggcttgttcggcgtgtcggtaagccgtgcgcgatagccgagcgtggccactgcggcaaccagcggggccacgctcacgcctgcatccgcctcgatttcggcctgccgctgcggataggacaccgaggccgcgcgcacgccgggcacgttcgtcaaagcctgctggacgtgctcggcgcacgacgtgcaggtcatgccttcgatgtggagggtgatcgcctcggccatgattacgccctcactgcttgacgctggacgggtaacccgcgtttgcggtggccttggtcaaggcgtcggcattggtcttggcctcgtcgaaggtgacgacggcctcccgcttctcgaagctgacttcggccttctcgacgccggcgaccttggacagagccgtcttgaccgtgatcgggcacgcggcgcaggtcatgccgggcaccgacagggtgacggtcttggtggcagcccaggcgggcgcgcttagagcggcggccagggcgatgagggtggtgagggtggtgagtttcttcatggtgatctcctttcagtagaacagcggcaggacgtagggaaacgcgagggcaaccagaaccagggcggccacgatccagaagatcaccttgtaggcagtccgcacttggggcacggcgcaaacgtcgccgggcttgcaggcatgggctggtcggaagatgctgcgccaggcgaagaacagcgcgatgagcgctgcgccgatgaagatcggccgatacggctccagcacggtcaggttgccgatccacgcgccagagaagccgagcgcgaccaggacaagggggccgaggcagcaggccgaggcgaggacggccgcgacgccgccggtcgccagtgcgccgcagccgttcttgggttccgacataaggttctccttccgggacttcgcttgatgctgtaacgttacttccgtagtcaactacggagtcaagcgccatggagaacgctcaagagaatctgaccatcggggccttcgccaaggcagcccgggtcaacgtggagacgatccgcttctatcagctcaagggcttgctaccccagccggagcggccctacggtcgcatccgccgctacgggcaggcggacgtggcgcgggtgaagttcgtgaagtcagcccagcgcctgggattcagcctggatgaagtcggccagctcctgaaactggaggacggcacccattgcagcgaggcggccgaactggctgctcaccggctggccgatgtgcgcgcacgcatggcggacctcacgcggatggaagaggccctgtcgacgctagtgagagagtgcaacgcgcaccatggcaatgtttcctgcccgttgatcgcagctttgcattgctgctaaagggcccacttcggctcttagcgtacgatttttttccgttttctgagacgacccctgattggcgatggcttcggtcagcacggggcgcaggtcagcgcctttgaatcgcagtgacatggatgaaatctcctgtgtggaagaatgagaaaggcctccatccgatgggatgaagggcctgtagtgcacgcggccggaacggctggaacgccgtggcggatgcctcgggtcagccgcaggaccgcccggtttcgctgcggggcgtcatgccgggacggcctggcgcttgcgggccgctttcgcgtcgaggatgctcacgtcgatctggcgccagcgcccgtcgtcgatgagcctctccagcacttcgccgagcatgtcgaaatacacctcgtcgtgccgatcgaccagttcgaccgattcaccgttctgacggtgcagttccaccacgtaggtgtctccgccgcggtcgtagaggatcgtcacccggccctcgaacttcgcggtcgagaccgtgaagctgatcgccggcggggtctcgatgatcttggagggcgtgggatcgacccaggtgaagtcgcgggcaccggcatccaccagcatgtgggtgatgcgccggaagcgatcgggggccggcatctcctccaactgctcgatgagctggcccaactccatgcactgcggcgtgggaatgggcagcttggccggcgccgagccgaggatgtgcctcgtgatggtgtacggcgtgccgtccgaagtctcctcggtgatgacctccggcgtgtccgcgcgcagtccgtcgaagcgacgacgggcatagggttggacatgcaccttggcgccttcggcaggaaccgtggtcaccaggctgggatcgagcaccgcgaactcggaaggcttgagcttgacgacgatggcatcgtcggtcgcggcgaccaccttgccgtcgaagggttgggggtcgatggcgaagcccagcgttgaggacagcggctgatcatcgaacacgcggtacttgaacgaccgcacgttgcggggcacatggcctgcgaccagcgaaggcatcatggatttgatgagggaacgatccatggggaaactccttgaggaaaaacaagggattccccgcccgcaagggagaggtcccttgtgggtggcgtggatggacgcggtaggtccgtaggaagaaacgaccagcacggtttcccgcgcttgcagcctcgaaggtctcgactgcctgggcatgtgccggcaacgccgacgaacatggggcaagcatggccctggggcggtctgcctgcccgcaggaaacggcaccgcaccacaaccgttttcctgtgctgcgggcaagaaaaagcccctcgaaaggggctggaggaatcaggcttggtacacgaagtagtgctcgcgctgacgcggaaagaacacgtgtttccacgtgtcgccgcttgtgttgccaccgtcgaagacgaccatttcgtagtcgtccacgtcggtgtccaccaggtcggcgctggcgatatggcgcatgtgcagcgtgccgctcatgcgctcgaataccaggatctggccgatggcatcttcctggctcatggcgttgacgcaggctccgagttggtgctcgaagtcggatgcgggtgtgatgaggtcggggaacatgggatcgctcctgtgaaagtgcgccggcccggctctctggcgggagaccgggccggcatgcggtgaggacaaggaaggccggggatgtgtgtggcagctattcgccggccagcgataggcccggcaacacgggtgcgtcggcatcgaggatgaggatgcgcacgtcggcctggccggccagttcaaggatctgtgccagctcgtccggcatgcccttgctgcggtgctcctgccgaagctgctcggcggcgatcccctcgacgtcctgcaggtgctggtccgtccagggcgtggagatcagcttgacgccgatcgccgggctgtagggaatccggaacgcgatgaacaaaaaggcctccggcgtcgcgaggtcagccaggttggccaggtactggccggtttcgcggctgatgtgcgcgctgctgatttcccagcaccggctgtagtagccggtctcgaagctcaaccgctgcacgacttcccgtgcggcctcggccgaataggtgtcgccaatgtggacggggcggccgtcgaagtcgtcgccgtggatcgcgtacaccacggcacccaccatgccttcgccgctgcccccttcagccgcgtcgcattcggcgatcagtgcggcgccgacaggttcggtgccagtcctgaccaccgcgaagtcgctggtgatgatgcaaggagaagaaaccagcgccgcgtcgcagaggtgctgctggctcgggtggatgtttcgccaaacatgcgggcttccgtcctcgtagctgatggacagcgtgcggacgattttcagattccagtagccgcgtagaaagggattgggattctgggacatgggatttctccaacagaataatgatggagcaaatccccgccaccgggaattgaccccggtgggtggaaagaaaggaaacagcgtcaggtgacgctgatcgttggcgtttgggccaatcgctcggcgacgcgccggcgcaaattcatgcggaatggctcgtcgctgacgcccgccagcagattgatggtctccagcgcgatcagggccgaagcctcttcgatgtcggcggccacaatggtcttgcgcaattggtcgccgagctggagggcctgggaggaggagctgatgaagcggacctcgcggctcaggtagcagccgttgccgccgaactcgaacagccgcggcttgctgcagtaccagcagccctcgaactggatggcggtcaggtggtgcccgtcatcgaaccgggtggcgatcagaaacaatgcgtcgagatcggcggtgtcctcgaacgaatgacggtcgatcaagttccccagctcttcgtcctcatcggcacggaagtgcacggcgagcagttcgagcagcggcgggatcgacagcccttcgtcgtccggcatcggaataccgagttgcgtggccaggtcttccaggccatcgagcacgtccggccattgcggattggtggtctcggcgatctgggcgatgtaggcctgcccgttgccggggtggctctcgtccagcgcgaaggcgccgaacagcgcctggatgacgggcgtcacacggtcgagcacgagaacgccggtggcttcgtagtagttgttggccatgaaggctcctttcgatgaatgaacggagccagcccttgcggacgatggcatccgcaggggaaaccgcctgatgccggatggcgctgggcggggagaaaacgcgagggacatggcctcgaacgaggcgcatgtccctcatggggtcccgtgaacgcagtgatgaaggtgtgccagggaccggctcaccaaccgctgtagttcagcagcaggtcggcgatcacctggcgacgttgcagatcgagaccatcgaagtccgacagtccttggaagtggcagcgcttgagcatggcaccgccctcgcgcgcgttgtagaagctgaacatggcggacaggaacatgcgttccccgctgctcaggacgccgagtgcgtcgttggcacgcagcatgtcgggacgcagatcccacttgctctttgcctggttcaggccttcgcgcgtgccgtcgccaaaccattgcgggcctgcgatctcgacgccgcgcttccagacctcgaagaaggcttggggcgcggcggcgaaatgctgctcttcccgcatgatctgatcgacgacttcctggggcaaaagctggttcatgacgtggttcctccagttggatcagggtgtggcgagctgggaccagccgcctctttcgagggcacgttgagccgcggcatagctgcggaagtactggcaggattcccgcgaaacgggaccttctgtatcgcgcgtgccgatgtagtggccggcggcgctatgcaggatttcgagcggcaggaacttgccgcaatggatcaaggccaactggccgaaagaggcttgctgggacatggacgggctccttggaaaaagcggggcctcgtccctcacgggatggcagctcccgcacgcggttgagaaaaaagcatcggcgtcacgggtgacgcgcgtccgcagactcgatgcgatggcggactggcgggtagcgcggaaagaatccgcggcagcctggaaactctggctgctggcatggtgctgacgaatcagcgacacatgcgggcagcttcatgcgcgaggcgagccgcgtcagccggaaatcggcatttgcaacagccccgattggcgaacgcggaaaaaagaaagccccgcaataagtgcggggctgtcaggaggatgaggcgaaactgggtcagcgaggcctgtcgcccagtacatgctgcttccacagggcgaatgcctcgtccggtcccagctctgcgaggatgacgatgggctggccccgacgggcacgcagcgatgcgaaatacgctggccggtcggcgatggcgttgagcttgatgccctttaggaacagcaactggcgggggcgaactttggtggtaacgcaggcatgattgcgcttgtttggggcaaaagggccagcgaagcgggcggacacggccagaaaaccgcgacgaactacttgtacttgccaggcgaggcgaacgggtgacatcagcatatcgctatgcggtaaagaagaccgtcctaaagcttgcaggatcccggcatagcttcatcatcacctctccgtgacggctcattggaacgaaaaaggccagcatcgccgtgatggactttcataattgccaggtcaactggcttgcgtgctgtttattcacagcaaggcattgcgacgtcgttgcagcaatcgccgccatcgcaacagggcgttgcagcaaaagcggcggtgggcgctagcatgagggccaagccgcggccgctcatgctgggggccgttctcttcagattggtgtcctgcaccgtgtgcattgcgaatttccggatcgtcccaatgtcactgggactcctttgtggcggccgggttctccacgctcatgaacgactgggccaccagcgcgatcgccccgcccacgatggccatgtcagcgatgttgaaggcgggccagtgccagccgtgcaggtgaaagtcgatgtagtcgataacgtgcccgcgcgtggcgcggtcgaacgcgttgcccaatgcgccgcccagaatgaggctgtacgaaaggccttccgttttgcgcagcggccgggagagcagccatgcgagccatgccgatattgcgaacgcgatcgccagaaaaaaccaccgctgccagccgcccgcgccagcaaggaagctgaacgccgcgccgggattgagagcgtgaactaggttgaagaatgacgccacctcgtgcgaccaacccaagggagttgtcgcgtcaatgtagctcttagctgcctgatcgccggcgaatataacgatcgcgagtgagtaccactgcgtcttgcgaagagatggttcatccattgttcatgccgccttgaacttcaggaggcgcagcccattgacgacaaccaaaagacttgcccccatgtcagcgaacacagccatccacatggtggcatgccctgtgaacgtcaacgcaaggaacaccgccttgatgccaagggccagaacgatgttctgcgtgaggatcgccgcagtgctacgcgacagccggatgaaggcggggatcttgcgcaggtcgtcgtccatcagggcgacgtcggctgtttcgatcgcggtgtcggtgccggccgcgcccatggcgaagccgatgtcggcacgggcgagcgcgggcgaatcgttgatgccgtcgcccaccatgcccacctggccctcgccgccgaccaggctttcgatggtcttgagcttgtcttcgggcagttggtcaccacgggcttcagagattccgacctgggcagcgatggccgcggccgtgtgctggttgtcccccgtcagcatcagcgtgcgcacacccagcgcctgcaggtcggccaccgcctcacggctggtttccttcacggtgtcggccactgcaaaaatgccgagcacggtcgcatcgtccatcagcaggatcgctgtcttgccttggcgctccagggtctccagccgagcctggagcgtcgcttcgctcaggcccagctcctgggcgagcctgtggttgcccatgtgcaacatgcgcccggcgacgcggccgcgcacgccgcggccaggcagcgccgcgaagtcgtcgacctcgtgcagcgcgatgccgtcacggttcgccttgcgggcgatggcctgagacacaggatggtccgagcgtgccgcgaggcttgcggcccaggcggcaacttcctgcgcctcgccgatcagcggcacgaagtcggtctgctcgggcttgccatgtgtgagtgtgccggtcttgtccagggccaacgccttgagcttgcgcccgccctccaggtagacgccacccttgatcaggatgccgcgtcgggcggcagcggccaagccgctgacgatggtgaccggcgtggagatgaccagagcgcaggggcaggcgatcaccagcagtaccagggccttgtagacccagtcaaaccatgcgccgccgaaggcgagcggcggcacgacggcaaccagcacggacaccgcgaacaccgccggcgtgtagacgcgggcgaactggtcgacgaagcgctgcgtgggcgcacggctgccctgcgcggactccacggcatggatgatgcgcgcgagcgtcgagtcgctggcgcctgcggtcaccttgtattcgaaagagccggtctcattgatggttccggcgaagacctggtcaccttcggccttctcgacgggcaggctctcgccggtgatgggcgcctggttgatggccgatcgacccgaggtgatcaggccgtccagtgcgatgcgctcgccaggacgcacgcggaccaccgcgccctttgcgacctccttggccggcagctctgtccatgagccatcggcctgccgcacggtcgcggtctcgggcgccaagtccatcagcccccgaatggcgttgcgggcgcggtccagcgacttcgcctcgatcacttccgccaacgcgaacaggaacatgaccatggcggcctccggccagtggccgatcgccatgccgccggtgaccgcgatggccatcagggcgttcatgttcaggttgaggttcttcagcgcgatccagcccttcttgtaggtgctgaggccgccggtgaagatcgaaaccagtgccagcacgatcacggcccaatgattgccgtcgttgacccagtacacgccttcggcggccaccgccgcaacgcccgaaaccgccatcggccaccaattggtcttgtgcgcggccaccggggcatcgcgcggctcatcagtcctctggacctcggcttccatgcccagcgattcgatggcttcgactgccggcttgatcgcgtcgggtgtgtgccgaaccgtgagcgtgcgctgcatcaggttgaaatccattccctgcacgcccggcatgccttgcagcttgccgcggatcagactttcctcggtcggacagtccatcttcgcgatgcgaagtaccgtggtggctgtctgcatgtcctgccgcgcagcctgcattccaatggaagcaagcgccttctcgatcggcgctgaggtcgccagcgtgtgctggactcccagcacacgctgcatcagattgaagtcgagcgcggtcacacccggcagcttgcccagccggtcgcggatcagcgcttcttccgtcgggcaatccatgttctcgatccggtacgtcacccgctcgccgatcggcggcgcggaaacggcagcggttggttgctgctgcagggccgaggatgggatcacagccgcggcttcgatcggccccgtgtggccgaaggtctgctccttggcgcgcatgccgatcgaggccaggacctgctccatctgcgcgcgtgcctgagcgaggtgtttcaccgacagggtgcgctcagcgaggtcgaagtcgaggtcctgaattccctcgactgccccgaggtgcgagcggatgagtttctcctcgctcgggcagtccatgttctcgatgcggtaggtggtcgacacggcggcgtctcggacagcctgagccttcatgcccaccgaattcagcgcttgctccaaggcatcggccgagacttcgcggtgcgaaatggtcaacaaacgctgcggaagatcgaacaggagccgctcgacaccgggcatgccctccagcgttcgccgcaccagtgcttcctcattgcggcaatccatgttgctcacgtggaaaacggtggtttcagtgctggcctgctcactggcgcacgccgtctgttggccattgccgccggagcaggcgcatgggctggaaggttctttgttcatagatcgctcttcattgacaaggttttccccggatgccatcattagaaaacctctagtagatatagagtcaagttttttataggaagcaaccatgatgcggatcggtgaactgggcaagaaggcagattgcttggtgcagaccgtgcgcttttacgagtcagaaggcttgctgcccgagcctgcacgtagcgagggcaacttcaggctctatgacgaagtccatttgcagcgcttgctgttcatccgccgctgccgggcgaaggacatgacgctggatgagatccgtcaactgctgaacttacgggatcggccagagttgggctgcggcgaggtgaacgcgctggtcgacgctcatatcgcgcaagtgcggaccaagatgaaggaattgcgcgccttggagcgcgagttaatggatctgcgacgctcctgcgatagcgcccgaacctcgcgcgagtgcggcattctcaacagcttggccgagcccgcctgaagctcgagcgtgtcatcggtgctggaagtgatcgggtccagttctgagagccacgtgccgcgctccatcatgcgaaagcgcgcgattctgacgttttgagacggcgtgcgaccgagggcgtggcccacaggagccagcgcgagccggacgacctgcgcgccgcaatctccgccaccttacgggttctccaggccagaccgagcatcgcggcgtggctgcgcaggtgcaggtgcaggccaaggtagcagtgcgccacgacgcggcccgactcatgggcacgccacgcaactcgcgatcgcttcgcaagaagccgcaaggcccgactcgcgcaagaatgcgacgtgggcaagatcgtatagccagcagcgcaagcgtttgccgctgctggccggctccggaagggatagacaagctgcgggccgtagtccattggaaagtccatctttcttgagtgtcactctttggcgcccagcgtgtgcttttgcgaccggaaagcgctgaacaagtggcccccgggcatccagaaatcgccgtagttgacttgggcgtcttcgtgctcacgcttgtgatgccagcgatgggcttcagccaccccgatcaacaatcccaacggcccgacccggtatcccagattggagtgctggaaggccagatgcacgaccaagaagccgagccatgcgccgacggccaaccacagcttggaacgccgctactggctcaacggggagtggaaaggccgcccgccctctagcaaggcggcacaagcgagcgcgacgatcactgtgagtagctccgtcggaaaagacggccggccggtcgcgagctcgccgaagagcacaaccgcagtggcgccacggatcagtggatagcagccataccggatgacagtcgcaatgaagggggcgcattggtgctcatctgttctgtcctaaagctctgactggattggaaaaccttctagctacggtagagtcaagggcgtccgggaagaccctgtggcaagttcgttgcatctgcgccttgactctccagccgctacaggcttcagcatccatcgatttggaaggaacaatgcatggctgaaaaccacagaaatcacgaaaacgacgagttgggccgcctagatgcgagcgatgcgaaggaccgaaagattcttctgactgtgttgctgatcaacctgacgcagtccgccgccggcattgcccttggcatctgggctggctctacggcgctgatgggcgccgggttggacaacctcgccgatgcgtcggtctatgcggttagcctgtatgccgtcggtcgtgcggcaacggtcaaggtgggcgcggcccgcttgtcgggtttcttgctaatcggcctggccgcgctgctgctgttggaagtcctacgccgcttcgctggaggggaagagcctgtcggcccagccatgatggccatggccgcgctgaacgcggctttgaacctagtgtgcctcagactactgcgccgccatcgcggggaagatgtgaacttcaaggcgtcagcgatctttaccagcaacgactccatcgtcaatggtgcgattgtgctgtccggggtgctggtgatggggttcgggtcgaacatcccggatctggtgctgggcgtcatcgtggccgcaatcgcagcgaatggggggcgggaaatcctgcgcgaagcatcggaaacagctcgccgtaaggcgggcacataaggcatgttttcgcccagttcatcccgaggtttacctctgcaaaagaggtagtccagcctttgggctacggcctcggctgcagccgagcgtaccattggcgatggccgcgcgataggcgggcatgccgttctcgacctccgtctgccgtacagcagcggtgcgcaaggttgagggtgcatgtcgtctctcctgttcgtgtggcccaggccaatggccgggccgggacgttgatgggcaggagaatggcgccgaaggcccaacggccttcggctcgggagaaaagaggaaccacccgtgggctgattggcaggcccggtcgtcgctagaaccgtctgctcatcaagcaatcacacccggcccatgtcgtggctggggccggcatcgtctggcgcacatccgcgcacaaagggagcccgtttttgcaccggcgggcaccggcaccgattaccgctgaccacgaagggtctcccggtggctcgtgcagcctggcaagccaccgggagacccttcgcagagggcggaagaaacgcagatcaacagaacgcgcgtggtgcggctcgcagagaagctaccttcaggtcccgcggccggggacggctgggcgggacgcgcacacggatcaagaaggcgttgcgcgctgggcgtcccgcagggcatgcggcggagtgcgggacaggggccacgccgccgaaggcgggcacggctcacggggaacgggggcggtcaggagcctttgcggccgctacggcgcgggcgcgaggcgccgcgcttggagctgccggattcgactggcagcgtgcctttgcagtccgggtagcggctgcacgaccagaacgggccgctcttgccgctgcgctggcgcgtgggtgcgccgcactgcgggcatgccggcccttggggaaccttgatggacagggaggcgctgccgtactgcgcaatcaactgcgaaatccacgcggcctgcttgccgatgaacacgtccagggtgagctgtccggcctcgatcatgtcgagcgcctgttcccagacggcggtggtgccagggtcggcaatcgccgcaggcacggcatcgatcaaagtgaaagccgcatccgaggcgcggatggcgcgccccttcttcacgaggtagccgcgagcgatcaggccgccgatgatgttggcccgcgtcgcttcggtgccgatgccaaccgtatccttgagcttctgcttcaggcggggatcggacaccagcttggcgacgcctttcatggacttgaccaactcgccttgcgtgtacggtttgggcggcagcgtcttgagtgccttgagatcgacgtcggccacctggcatgccaggccctcatacagtttcggcagcgcgggcagcacctgggcgcggaccgcagtatcgccctcgccatcaccgtcttcggcctgcggctcggcgagcacctggcgccaacccgggatgacaacctgcttgcccgtggccgccaggttctgccccccgcacgaaaacttggccacagtgcggtcgaactcgtggtgagggaggaactgcgccaggtaatgcgaccggatgagcctgtacacggccagttccttctcgctcatggcggagagcttcgccggttcgagcgtcgggatgatgccgtggtgcgccgtgaccttgccatcgttccaggcgcgcgagcgctgcgagcggtcgagctggcccatgatcgagcgcagcgagggatcggtcttgagcaggctgtcgagaacggtgggcacttcggcaaacatgctctcgggcaggtagccggagtccgagcgggggtacgtcgtggccttgtgcgtctcgtacagggcttgggcaatctccaaggtttcctgcacgtccagcccaagctgcttggaacacacttcctgcaaggtgcccaggtcgaacggcagcggcgggccttcgcggacacgctcagtctccaccgacacgacgtgggcactgcccgcagcgcggatctgctgcatggtctgctgtgcgaccggctgccgcaggcagcggcctgcgtcgtcggtgcacgcatcgggtggaacccattgcgcggcgaaagtcgaaccgcctgcgaacagggacacggcgatggcccagtatggtacggacacgaagcgcgcgatctcgcggtcgcggtccacaacgagcttgagcgtcggggtctgtacgcggccgaccgacagcacgccgtcgtaacccgcctgtcgccccagcaccgtgaacagccggctcaggttcatgcccacgagccaatccgcacgggagcgcgccagcgccgagtggtacatcgaaagcgtctcggccgaaggccgcagcttgcccagtgccgcccgaatggacgcatcgttgagcgccgacagccacaggcgttcgatggggccgcggtagccgcaaagctccacgatctcgcgggcgatcaattcgccctcgcggtcggcatcggtggcgataaccaggtgagtcgccttcgccaagagcgccttgacgaccttgaattgcgtggcggtcttcggtttgacctcgacccgccagtgctggggaatgatgggcaactgctcaacggaccatcgtttgagctgctcgtcgtaggcctcgggcggcgccgcctccacgagatggccgatgcaccaggtgaccgtgacgccggaaccgttgaggcagccttcaccgcgctgcgtggcgccgagaatccggccaatgtctttgccctgggagggcttctcgcacaagaacagccgcatatccgtccatcccgattcctgttgttcatggagttgctgggatcgaggatgccgagcgcagcccctggcagcagcaaacaagccgcatgcggcagcgaccgctttcacgccgatgaaatggcgagtgcggggaaggtgcgtggccggaagtgtgcgggccgagagccgcgatttccgggagcgcgcgtggaactcggtggacgttggtggagctatcccctggggataattcgcagcgcatggagggcggcgaagcactgcggcagccgccctccatgcccgatcacttcctgcgcttggtctctttcggcgccgtcgattcctgggtggcctggggcttcggctctgcctcctgtggcttcgggctgagggccacagactcgatgcggtacggcaggatgccgacactgcgcgcgttgacctgccaagtctcacgcggctgatcttcgttgtccgtccaggggtcgcgctccatgcggccgacgaccagcacccgcatgcccttctggtagagctgctgccagcggtcggcgtcgtggtgccagagttccaccggcgcccagaagccgccgcggtcctcgaactcgccgcccttggtggggacggggttgtcgaagtacacgttcagccggagcaaccggcgaggatcgtcgttgccattggggaattcgcggtactcgggaggcgatccgatgttgccctcgccgatgaattgtgtgctcatgttggaatctccgtggtggttgaaatacccgtgcctcgttgggctcgggcgcgtgctcggatggcaggcgcaatcaccgatcgcgcactgcggcaggaacggacgcgagccggcgcaggtaggtgttgtccgcctgcgcggccttgctggcgcattcctgtgcttgcctgcccagggtgtgcagcaggctgatctgcatgttcagcatgacgcgctgcagttcgatctcgtgcaggtcgtgcagcaggttgaccggcgtgctggggctcgccatcagctcctgccacaacgccacgcccatggccgatcgatcgtgcttgcgccagcgaagaaaggtcgtgcctgcgccagtggtctgctgggccagctcgacgggaagcaggtggaagggatgcccgcacgcctgtggcagcacctgtcgctgcgccagggcaatcaactcgtcgcgcatggcgaagcactggctggcccaggcctcgaagtcccctttacctttaaaaggctttaaaaggccttttagagaggccgcgtgttccagccgcatgaaggctggctgttccagacgacggaagtagcgcggttcgcggttcgggtcgctcatgccggttcgtcctcgccggcggctgtggacttggcctcggccgaatcggcggcagcgccttcgtcggtgggagatgcggctgcggcagcgctatcaccacgctgttgcagaccacggcgcacgacgggcggcgcaaacttcgagcggcgcatgccttcgagcacgtcctgcggcagttcgccgaacttctccaatgctgcccgagctgcggcgttcttggccgcgaagtcgtcgcgggtgcagcccgagtagcggtattgctgggccaggctgaacaggctgcgcagcgcgtgggcaccttcgttgagccagcgctccaacgtcgagcgatcgatcagcgcggtgtggtgggcgaggatcagcttgcgggcgatgtcgtcgtagtcggccagcagatagacggcggcaaagccgagctgcgcgttcacgaacaaggggagcttcaccggctgcacgttgaggttctcacccaggctcaacgccgcaggcacgccggccagtgcctggtcaacctgctcgcgcagcgattgcaacgtggtcctggtctggtcgagcttttcctcgatgcgcaacatccaccagtcgctgtacgggtcgtcctgctccgagccgcgcttcatcttgttcatcacggcgatgtagccgttcaggccgacgatgccgggtcgcccctcggcggcggcgcggccatgccagatgcgcgaggcgtggtgggtgtgcagcgtcagcgacatcgcgctgcgcagggagccgaggttgagttgcaatggttcgttgctggttgccatggtgatcgctcgctggtggacagggagccgccagcatccgcatgcagcggaaggcagtcagtcaacaaaccgaaatgagccgacccccggttctgtgcgcgctggcggcgcagcgcgcaacggtcccctggggaccgctccgcagatgggcactcacatcggcgttcccgtcctcggttgttgacggtatgcgtgctgcaccgcacgtcgcgctgccgttcgacacgatccttcgccgcgcagccgtccccaggggaccgttccgttgagcgccatggaggtctgcttcatggtcttgcatgcgctctactcaggttttgcgcagcatgtcgcgccgtcgcccggcgcttcaccgcacagccgtccccaggggaccgtttctgccgaccgccatggagatctacttcacggctttgacaagccctgtgctcaggatttgcgcagcagatcgcgcaggcgctcgatgtgctgccgggccacctcgggcggcacgacgttgcgcggcggctcggttggtggcgctcgcgccgccgatggtgttggcggtgccgggccggtctgcttggcccaggcattgaactcgccgcgcatggcgcgctggatgatgccgaacagataaccggcggggttgcggatgccatgcttgccgcaccgtgcggcccattcgtccagcacggcctgccgcagggcagcgtccacctgctgcaacgccatcttggctccggcctgctgttccgccttcagttccgcgaagcgcttgggccattgcaggtcgcccagcgcacgcgcctgcgcggtagtacgtacttcatcaatacgactactacgtactgtacggtcctgcttcgaattccgaagagcgccgtctggcgcgggtttcggccctgcttcggattccgaagatgggcgatcgccattccgaagaaggctcgcgggcccttcttcggaatcgtggaccgcatcctcctgtggataactttcggaggcggtgatgccctggtcggccaggcgctcggcgagcacttgcagccgcgacggcaaggtgcgtccggacagcatcgggtcgtccgcgatctcctggagggtgttgagtcccaccacctggacggccttggccgaatgccccagcgactggctgaccagggccaggtagtcggcgtcgagttgcatcgcctcgaacggcgtcagcggttcgtcgtgcaggacgtagaggttgccgaggatgcgaccggtcttggggtcgcgccgtcgtcgcacgaggctcagccagcgcgtcaggcgcagcagcgtcagcgcccgcgccacggtctcatgggaggcctggcctgcgcagggcatcgacgccagccaggggcgcaactgctcataggtgggaaatgccgtgacgccatcgtcgttgagcatcaatcggaacacctgccaggcgttgcgctccagcggtgtcaggcggcggtcgaggaacagccgccgcggcacgctctcgtgccgattgccactgaacaggaaggcgtcgccggacgtaggaggcgtgggcgttggagcaggcagggacgcgggagcgccagagctggacttgggcgcgaggtccttcagcgcagcgtcgaacaggtcggcgagtgcgatggggccagggcgctgggctcgtggggcggtgtcgtccacggccatggcctagcccaatccctgatcgacccagttcctgatcgcggcccagaccaccgagagcggcagcgacatgccctcggccaggtccatggccgcatcgagaatcgaggtctcgtcctccagatcgacgttcctgctgctggtcacggctttccattgccgccacagttcggtgtcctgggtctcgtccaggacggggtggcgccccttgcgcttgggcaggccgaggatctcccgccgcagggcgacttcctgatgggtcaggccatagaagcggctgaccatctccgtgctggcccccagccgcagcatgcgatcgaccgtggcgatttccttctccacgtcctgtgcctggttgagcaggcgctgcagcacttcgcggttgaccgtgaccgagcaccacgagacgctggcgttggccagcacgctgatcagcgcggggtgcttgagcgcatccagctcggcctcgccgaagcccatggccttgcagcggcgcagttggccgttgcgaaggtcatacagcgcctgggcaatcacggcctggttgagcggatgcgatgtggacatgcggcctccctcgctcacgtcccgggcgccgtggtgccggcttccaggtccagcagacgccgggcgaggcgcagcagccgaaagagcttgaccaacgccgtgtcgctcaagcgccttgcgccgctgccatggccttggctctggccgtgcaacagggtcggcaggtcggcggcgagctgcgcgccgtccaggcccgcttcggcgacgggctgacccgtcagggaagtgagcagcgtcagcaccgcgcggccgagcggcgacggggcttggccgcgggcgcggcacgcaaacccgatgccatcggcgcgatcctcgatgcactcgtccaggcctgcctccccggcgatctcgcgcgcgaactgcgcgatgtggatgcgcagccgatcgggcgtgtccaggccggcgtcgatgtaccagacgtcggagatcggatagagtccgccggcttgcaccgggatggactgcagcacgctcgccgagaagtcgggcggcagcgcatcgcccaactggtcggcgaccatgcgctggatcgattggagccgttctgtcgtcggtgctggcgagacgatgtgctcgcgaagcagatcgcccggtgcggccggctggcttcccgtggccgcttcgccaaccgccgtgtcgtcgtggcgcaaggtgggctcggacgccggagggctggcgggtggaggaccggccgccgctgcaggcgtggcgatggacgatgctgcgcccggcggagtcggcgtgccggcggtgggcgaaggcaacgccggctgcgccgcaggtggcgtcgggtcactgaccagcgcccggtggcggctttccgattcggtcaggtccagcgccagcacgtcgtagccgatgcccagcagctcggacatctggccgatcagctcgtcttgcacgcgctgcggcgcgaactcgtcgccctgcgtgtcgaactgcgccagcacctcctgaaagaaactgtcgaagtccagcggcagcgaacggtccttggcgtagtgctcccaggtgcgtttgcaggccgtgcgcatgaccgacagccgctcgacctggtggcgccccaggccgccatagagcacagtgggaatggcgggcagcaggtagcgcaccgcgtcggccatgcgggtgatgtgcgaccgctggacggggaagccatcggccgccaggcggcgggccagttccgactggctcagggcggcgccgctctcctgctcgtagaactcccgtgctttctcgacgccgagcgcgcgctcgatgaacgtgaggccgccgcgcagttcgttctcggcaagatgcccggtcagcgcgacgatttcaccgcgctccggccatggtcggaacaggcacgatatgcggaagaagcgttcttccttggtctccgaccagagttcgcgcaggatcgccagtcgcgtgttgccgccgttgcggatgatgtagtggtcctcgccgggcctgcgcgtgatggccggcgccgcgtccaggccgcgctcgcggatggatgccttgatttcctcgtaagccgggttgcgcttcatgcgcgggtcatggtcgtagggccgcaactggtccagcgtcacgaccatgggcgtgtccgcgatcgggtcgctcaaggccgtagccgctgggccgctgcgctcgaagccggccgcgagcagcttgcctgccatgtcctgcgaggtcatgtcagccatggccgcacccctcgcagtccccacgaccgccggccggcgccatgcgggcctctcgctcggcgcggcggatctgcgcacgggcgttcaattcggcccggtggtcactcgctgtcgaactcgtgtagatcgccgcgcagccggccttggtgaacttgaggtgcccgcccggcgtgcgcttgacgtgccagccctcaccgaccgcgaactcgatcagggcgcgcagccgcttgtggccgcgggccagctcatgtgcgttcgccatggggcctcccaggatcaagaggtcgctgcgggcggccggatacttgagccagtcggtcctgccattgcgggaacaactcgctggcgagcgcgcgcatcgtgtcgagcgcggcaggggcgactctgccgggcggctggcggtgctcgacccgatgcaccggcaggccgcgcgttgcggcacgtggatacgcttctatggccggcacgtcggtggcgagcacgcggatgccggcgctgtcctggaacaggtcgcgcaaggcctgctggatcagccgtgcgttggcggacaccgggtggacgcggttgatgagcaagtgcagcggcggcggttcgatgcccaggtgccggtacggcgcaatgtcttcgagcaactgcatggtgccgcgccgcagctcgcgtgccgcgaggatctccggcgtgacgggcgacagcgcgagatcggaggcgagcaccgccatctccagcagcacggaacgcgcgccctgggtgtcgatcagcaccaggtcgtagaggggagcaagtgctggcagcagatgccgcaaccgcaggcggccatccggcgcatgcagcaacaacgtgttcagctcgccccggtggtcgtcggacagcaccaggtccaggcccgcgatgatcgtgcgggacacgagctggccaaggtcgcgctcgttgaaggccaacagctcatagatgccgcccggcgcgcgctgggtcagttcgtagtaggaggacaaggtgggctgcacgtcgagatcgagcagcagcacgcgcaggcccgcgtccgcggcgagcccgcccaggttggcggccgtcgtggtcttgccgacgccgcccttcgttgaaatgatggacacgacctgcatggcgctctccggctgggaatgggaagtccgcgggagagcgggtcaggtccggtggttgaggcgctcggcgatccactggtcgatttcgatcgaatcccagccgacagcgcgcacgcccaggcgcagcgcctgagggaactggcgcttcttcatcaggttgtagatgtgggcgcgtttgaagccggacttcgcttcgacttcatcgagccgcaggatgcggcgctcgttcggcgggagtacaggggtctgcgacatggcggtcactcctgaacgctcggtggcgtttgttggcgtgacctctattcaatagacctggctgcggaaagacattgcaaatgcaatctccgcgattgcacatacaagctggataacctcatgcgcttgcgctacgaacgtacctcttagcgttggcgaactttccgtttaaggtgcgctcagtgatgcccatggtgccgccgtagtgggcgaccaatgcagagacaagggcctcctgcgttttgaagctggaatagggcacgcctgaaggcgactggctcagcatcagcgtcaacatccctccaatgatgttgagataggtcgtttccgcccgttcgctgatctcgcattgcttggatgccaacagcaccgaggattgcttgagtagcgtgtcgtgctgctcctgcagttctcgcatctcacgtcgggcttgttcaagcgcggcctgaagggccagccgctccacgaggatcgcctgtcctgtttccatggtgatgaaaggatgcgccatgcgttcgccacggctgaacagaaatcctggccggtgctcgggatagtgggtgcgcatccagcgttttagatcgacatggcgaacagtcagatccagagaattgagcaggttcggatcattgagcgtgatcccgttcttgccgtagggcagctctccgttgaggatgccgtcatagatacgttccgagtgcagccggcactcattccatcgagggcagttcagcgaccgaggcaggacacgcggtgacgcgatcgtggccaggatcatcgggagataccgcagcaacccagcccatcggatggccgcctcgatgggacgatagaacacctttgatgttgaaatgtccttgtgcatgtcttcgtctcctttcgggtgcgctacatcaccggctcctttcttgcccaagggctgttgtgtcgttatggcctgcgacggacgcttgaggcgatgccctaagcgaaggcggaggaggccattggcgtccgccgcaggtggccttgtcttgcttgatatgcaagaatcgatcagttgccggcccatcgagcgatgaggacgcaagctcgatattggcgctcacggtaccagcgtcataggtggcgcaaagcccatcaagaccgatttggtatggtctgatatccagacggttcaagaccagcgagttgaagcgttcgacgcccctacgtccagttggggactggaaatcagcggttagtgatgcatcgctccacatgctgatatatcgacaaagtatctgccgcagtaccagtgaccctgccaggttgccccagcacataggagacggagatggctgaacattcccatgaacatcaacatcacacatccggtcagatgggtaagcacggccgaccatacgccaagttctgggtgaacatggtgttgggcctcgtcgtcatgtacttcgtaatgttcagcatgatcgacggcgccagggacttcagaaacaatctcaacatgctctacatggcggtcactatgtgggcgccaatgggcatcttcatgctagcgacaatgcccggcatgtttccaaaccggcggctcaatctcgtgctgtacggcttgtttgccgttctcacactcggttcttttgccgctacccgtgctcaaaccggaatcggcgatcgacagttcatcgcgtctatggtcccgcaccattcgggagcgatcctcatgtgccgcgaggcgcagctctcagatccggaactcgtcaacctatgccaagcgatttccgatggccagcgcgcggagatcgagcagatgaaccggattgctgcacgccttcgttgaggctggctgccactacactggcgccgcgttgcgctccggcgaagttagccgcagcgatgtaaagatgagtacttgcggtgttccgatgccggcggttgtgtcctacagccgtccaggtgccaggtagtccacgcgacaccaccccgcgctgcctgcggagcgagcgcaagtcatgatcgtcgcaagttggagttcgatagcgaacccgctcagcagctggacgcatcaggcgtaacgacgggtggatggatcatccttggacgctggtggaagtggttggatgaactttgttgccgagggcgaaaaacaaggctataattgagttcttcgctgatcaccacagtggagaaagtgattgggaaacagagacttagcgctctagtgcatgactcgtttcccgctccaaacatgatccaggtttcggcctgggtcgaagagaaaagggccttcgggcccttttttcgtttctgcgatccgcaccgccctggtgcttttcccgattccccccatgttcccctcggcaggccgctgtcccgccgcatctgctcgctcgatcgtcgagacgaaaaaggccactcgtggagtggccttctctggtggagcgacggcggcgatcagggcagcgctttgagcaccgtcagcaggctggtgaggttgtcggccacgcccagctggccgatcttctcggtggcgccgccggcggcgctggtatccagactgtagatctgcatcacgcccatgttggaagcggccagggcaagggcgttctgctgttgctgggcagctaccgaattctcgaacaggatgccggtggagtgggccatggtctggaagatcgagcccagcgccatggccggggcttcaccgatcaccttgacgttggactgggtgacggcatcggtgatctggttgtttactgcggttgggaagctcatggtgattctcctgaatcattgcgaaggatgtacggcgactgcttggacccggcgggtcaggctcaggtgaaggatttcagtacggtcagcaggctggtgaggttgtcggccacgcccaactggccgactttctcggtggctccggcatcggcggcggtgtcgaggctgtagatctgcatcacgcccatgttggaggcggccagggccagggcgttctgctgttgctgggcgctcaccgcgttctcgaagagaatcccggtggagtgggccatggtctggtagatggtgcccagcgccatggctggcgcctcaccgacgaccttgacgttggactgggtgacggcatcggtgatctggtcgttgactgcggtcggaaaactcatgatgtgactccctgtgagtgaacggcacggctcatgtcgtgctgtcttgatgaacgctccagccagggagttgtgaatccgtcggcgccaggcctggcgggcggcgaaaatgcaagcgccccgcgaggcggggcgcttgtcggtgcggtctcatgcggcgggcgggtcgggcttgtccggcggcggtgcggacgtgttgtggttgctctggttgaagatggcgatagcgttctccagttgctgcttgagcgagccgaagttctgctcgaagcacaggcgtacctcgctcttcactaggttggccaggcggtcggcaatctgcgacatcaccaactggttggcgcttgcctggccgctctgcaggtggctgggacgcagttcggccaggctgccggcggcattgaccgcctcaagaatcgcctgctcgccgctgtcctgggcgcggagggcctgggtcgaggcctgctggacgttctgcaggatctggcggatggagccttcggaacgctgccggccgttctcgatcacctgttcggcctgctgtcgcgcgtgcacggccggatcgctgctggcgtcgttgccgaggccgagctggaactgtctcaactgctcgtgttcttcgctggtgagggggcgtttcagccagcgttgcgccagctggaccagattccttcccaattcttccgagatcgacatgcgcggactcctctgcgatagacgcgcggtgcgcggggtgtcgtggcgaggcttcagtactgctgcgtgccgtccgccgagggggcctgcgcgctgccgccggtatcgccggggtaggcggcggcagcggcctgcagggtgctgtaggcggtgctcaactgcaccgccaactgtccaaggctggccgggtcgtccacgctgtctccctgggacagggcctggagccagccttgcaggcattcggtgaggagtgccttgacctgggtgacgagggtttcgagttcttccttcatgacgcttctcctggggtgggtgctcatccgagcagtttcagcacggccaagagcttggccgcatcgctgtccgatatttccagcaggcgctttccgctcgccggcctgctggggggcggttggtcccgtgtctcctcgctggcgtccggcgaacgctgcgccgggcggtccgcggcggcgagcgcgcggcgtctgatgtagcgtgcgtaggcgctcatcggtcgctcctcaactgctgcgggtggagatgcgcacgaccgaggcgggggcggcgaacccttcgaagcgctgcagctctcggtcccgatggggcgcgccggccaggtcgacggcgccgatggtttcctcccagtaggcgctgcccagttgcaccagcaggcgttgggcattctccagcgaagcgaccggtacccggccgtggcggtccgcggcggcatagttgagcaggagcgccatgcggatcgcttcgtcctgtacgttggagtgctcgacaccctggccgtcggcgcccagcagataggagcgccagttgaggacctgggcgaagaggcgccggtaggcttcgaactggaagtagcgatcctcctcggagcggtagagcgcgcactgacttacgaagaactgttccagcgcgggtttcgcccagccgggtgtacccgggaggtgttcgcccagttcgtcgaagccgctctggctttccgccagggcatggacgtactgcatctgttgtgggtccaggcgctgttcgccctggtaggcgatggccaggctgagttccttgagctggtcggtgccgacgtatccgtcgagatggcgcaggccacggttcaggcggtattcctgcagcgagtcgaagaggccggaggcgccggtaatgaaattgcttcccaggttggtgtcgaagcacagctcggggaacttgctggccagatagttgcggtagtagtaggcatggccgatgcgcaggctgaacagatcgctctccagcaggcggcggtagtagctgttgccgtcggcgtcgcggctggccagcgcctggcagaggttcacgacgttggtgcgggcgtagtaggcgaccagggcctgggtagtcccgctggtgatgtcgaagcggcgtagccgcaggccggaggaggtcaggctgttgccgaaaaacagttcgtcgaaaaggccggcgagggcgctgggcgccttgtcacggtcctgcaggttctcccgttcgcgtagccgcgccttgccctggcggatggtgttgccatagcacttccaggcataggcggagagcgctgcgtagaaatcgtccagcgcgttggcgttgcgcaggaagtaaccgcacagcgaccggttgtcgtcggacaccccggtcccctctccacaatggatgtgcaggaccaccttgcgggtttccggcttgccgtccaggtagcggcgaaacaccgcggcctgttcgaggaggaagtcgaagaactgtcggtacaggccggtagcggtctccatgccgagcaggtcgatgccgaccagccgggcctgcggtggctgcccctgctgtatttcgaaatgacggaggatcctgtgcagctcggcatcgaaggcggcttcgctggcatagccatgcgcggtgtgggcgagcaggcggtaggcggtcttctcggaggcgttgaattgttcgaacagggaatcgaggacggccacctcgtcttcccccgtcgccgtctgggtatggctgattccttcgtggaggaggaaccccagcgtcaggcaggcgaattcgcccggatggcgatcgcggatggcgccgcgggcccagtaggcgtcgtcgaacggcgtgtacttgttgccgctccagatcttgcggttgaagtagcggacgaactggtccgtctcgctgtcgcgaaccgcgctcgcaccgagcagttccagggtgccgaggtagatcgccggctggtcgatggccgctggcggcgaggtccggccaaaacgttgtgccaggatgaggcaggcgagatagatgttctccgccgcgcattcgccgcgcaggtagccctgacggtcggtcgcggcgaacggattgcgcctgaccatccgctgcagagccagttcgaacagctcatagtgcgcggcctggcgagcctcctccagcgccttgccgtcgacgtccggggcgacgccgcgggcactcatcagcagcccgatcagggaaagctcctggcctttctccaggctcacctgccgctcgccgacgcggaagacccggcggtcgcgcgtccagcggctgttgctttccaccggcaggatgccggcgaagtgactatggaagtcgaagggatagcgatggaacctgaccggttcttccagcttgaaataggccatgacggctctcctgtgccagggccgggcgccgccggccccgtcggtggtggctacgattgggtgtccttgccgccgcgactggcgagggtctcgctgtacttggcaatgctctggtcgatcttgtcgatggcgaagctggccgattccgcctcgatcgccccggccgccgcggctaccgcggcggcagcgcccatcagcaggtcggtggcaagggcgccgagcgcgtcctcggcagcctgggccagcttgttttcggcgatgttctgggtcatctgccggagcaggatcgcctggctggccagggcgatcttgctgactccgtcgaagtagctggcggcggattgcgccaccagcccggaggcctggctgatcatcatgttcggcgcgatggcgatctgcgacggcgcatagccggcggtttcgctgttgctcatctgcaccgcctgcacgacttgactgttcagggcgctggtgtccggtggcggcgcctcggtctgcttgagcaggcgctcgctcatgccggccagcggcgaagggcgcgacggcagcttcacgtcgccgttggcggacgccctgccgccgctggctggcgtctgccggccggcctcgccaggggcggcggcttgctcgctgtcgccggatggcgcgggcgcgggcgcggatttcttgccgaagccgaacatgtctgggcactcctgggatcaaggggcgggtcagatacctttcttgtcttctatcgccatgatcatcgacaccgccttggaaaccaccgcggtggagatctggttcagggcctgctggctgtagactgcgttctgcagggacaggccggcggaatggctggcgatctggtagagcgcggcgatggcctgggccggggcttcggcgaccaccttgacgttggtctgggtgacggcatcggtgatctgggcattcacagccgtggggtcagccatgggactctccttgaatgggcaggtgctcgtcgggcaggggggccggtcgcacgggcctcgactcgcttgtcaggaatgaacgcggctgcgtctgtcttgtgaaacgtcgccggcgaaaaagtcggcgctcagccgcgagcgcagcaactgcacgcgcttgcgcaccagcggcggggcgatgccgagttggctggcgatgtcggcatagggcagttcttcgatgaagcgcagctcgaagagctgctgctgttggcgcgacagcgaggccagggccttgtccacctggtcgagacgttccagctgctccaggcgttccagcggcgagccgacggcggcgaagcgctccaactggccatcgtgcaggtcgatgccgcggtcgatgaggcggtcctcgcggatctggtggcgcgcgctgtccaggtagacgtgttccaggaccaggaacaggaagccctgggggtcgcgtacccgctccggtgactggcgcaggaacagcatcgccttgaccgcggtgctcgacagccattcttcggcccgatggctgttgccgcgcgcaaggcgttgcgcgcgtttgcgcaggccagcctgcgcggcacgccagctttcctcgaacaggcgatcggaaccggtttcgttgccgcctggctgattcggacgatccataaccgctacctccctggttgctcgtgtcggcgagcagtctgtgaggcgggcggtgggcgaggctgttacctgggtgacaggggcgcggccggcagttcggccttgcgtcgtaggcgaccgaggtcgttgatcaggatccggtcgttgtggcagctgatcagcccttcgcgtttccatatttgcagttgcgcgttgagcttcgggcggctggcgttgagcatcgctgctaggatgctctggttggtcggtagtgtcgcgcaggctccctcgggctgttcgctcgccaggctggccaggagatggcgcgccaggcgcgactccaggcgatgcaggcagaccctctcgacgaaaccggaggcttcgcgcaggcgcgaacagaggagggccagcgcgcggttgaggaattccgtgtcggcgatcaacggggcgaagtgacgtcggtggaggatcagcaccgacgccgcgccggaggcgtaggcggaggtctcgcggcggttcggctggatcagcgcggtttccccgatcacttcgccaggacggatgtcattgacgatcagttcccgcccgtccggcccgtagagcacggtatagaggtgtccgccgaggaccaggccgatgaagtcttcagggtcgtgcttgaggaacaggacgtccttgtcgcgcaaccggcgctccgacgcatgggtcgccacgtgccgcagcagatcgggcagcccgtgcagcagcgggcaccgttgcagcagggtgtagtggcgtgaacagcggtcttccgttgactcgttcgagtgcatgcctgcgccttcgccagattgatcggcagctccggcgaggtacgacatgctcgctgcagagcaatcagtggggacgtgtgcggcgaaggggtgtgaagctccggctacccggcagaactgctaggtacggactcggcgcgctccggcaatcgggcgggcggtccgttttttattcggaaagggtagcgaggtttgggctggcgggaggcggccccgagcgcacggatggcggtcggggcgggacggccggtggccgtggcgggctcagtgccgcgggctgtcctcgggcagcgcgagcaactgcttttcgcggttccagtcgaacgtttcgccgcgctcttcggcttcgtagcggcgctcgtcgaggcgctggaacaggtcgatctcttcgtccggcatgaagtgcaggcaatcgccgccgaagaaccacagcaggtcgcgaggtaccaggtgggcgatctgcggatagcggtggaagacctgggaaatcaggtcctggccgaggtattgggcgccttccgggtcgcgcggcagttcgtccatcagttcgtcgaaacgctcgaggaacagcccgtggttttcttccggcacctgctcggcctcgcccagggcgccgaggatgttgcgcaggtgctggagcagggcgaggtggtgctcgaggtaggagttggccatgacgggtcctctggaaaaaagctgggcagtataaagggtttcgcggcgccggccagtttcagcggatcgccggggactggctctggcgccggcggttttccagttgccggcgttcgctgtcgaggcgccgctggtcctgctccaggcgccagcgctgctggtccagttgctgctggcggatcaggttgtcctgcatctgtcgctgctgccgttgccgctgcaggttctgctgctggcgttgcagttgatcctgctgcaattgcaggcgttgttcgtcgaagcgctggcgctgttcctggagctggcgttggcgctgttcgccagcgcgctgcaccgcctgctggtgcggctgcacgccatagggcgcaggcggtgcggcctgcgccgggggcaggaggagaaacgaggctgccaggccggtggcaagtagcttgagcatgatggcctcccgtacgtcagggatgtgcccgtcgattctagccaatcgcccgggtttgggtgggtgaagacgacaaaggcgccggaaggcgcctttgtcggttgcgaccgtcgctttgccgcggagtgtcagcggatcctgccgtcggccagttgcagttcctccttggcgaagtcgtcgacgtcgatcaccttgcgccgtgccgcttcggcctggtgcagggcctgcgcctgctcggcgctcagcacgccggcggcggcgccggcatcgatcgggttctgccccgcttgcggctggaccctgccttccttgatcgccttgtgcagggttttctccagcgcggcgctttcgcgtaccgcgtcgaaggcgtgggcgagggcaccgaccgggtcctgcgggtccttcggcaggaacgcgccggcgaggatcgcctgcaacgccgggtcgtcgtccggacggccgaggatttccgcgatctcggcgtccagttcgtcgcccggccctttgtgccggcggccgaacggcagtaccaggaccttcagcgcgcagccgaagaagcggctggggaagttgttcagcaggtcctccagcgccgcctcggccttgccgaggttttcctccatggcccagcgcagcagcggatgcaggtagtccgggttgcccaggtcgtggtagcgcttgagcgccgccgagcccaggtagagatagctgaggacatcgccgagacgcgcggagaggcgttccttgcgcttcagttcgccgcccagcagcatcatgctgaagtcggcgagcagggcgaaggacgccgccaggcggttcagcgcgcggaagtagggacggctgatgcggtcgccgggcgcgttgccgaggtggccgcagctgagactgaggaggaagctgctggcggcgttgccgacggcgaagccgatgtgcttcaccagcagcgcgtcgaactcgcgggcggcctggtccttgtcctcgcgctgggccagttccatttccttgagtacgtacggatggcaacggatcgcgccctggccgaagatcatcaggttgcgcgagaggatgttcgcgccttccaccgtgatgaagatcggcgcgccctgccaggaacgacccaggtagttgttcgggcccatgatgatgcccttgccgccatggatgtccatggcatgggcgatgcactcgcggccgcgctcggtgaggtggtacttgaggatcgccgaaagcaccgagggcttctcgccgaggtccaccgcgttggcggtgaggattcgcgcgctgtccatcagccaggcgttgccgccgatgcgggcaagcgcctcctggatgccttcgaaggcggcgatcggcacgttgaactgctcgcggacctgagcgtagcgaccgctgacgtagctgctggccttgccggcgctggtgcccaccgccggcagcgagatggagcgtccgaccgacaggcagttcatcagcatcatccagcctttgccgatcatttcctgcccgccgatgatgtactccagcggcacgaacacgtccttgccggagttcggaccgttcatgaaggcggcgcccagcggcacgtggcggcggccgatctcgaccccgggggtgtcggtggggatcagcgccagggtgatgcccaggtcctcctcgtcgcccagcagatggtccgggtcgtggcacttgaaggccaggccgaggagggtggccaccgggccgagggtgatgtagcgcttttcccaggtcaggcgcaggccgagcacctcgcgaccttcccattcgcccttgcagacgatgccgacgtcggtcatgccgccggcatcggagcccgcgtaggggccggtgagggcgaagcaggggatgtcgtcgcccttggccaggctcggcaggtagcgctggcgctgctcgtcggtgccgtagtggagcagcagctcggccgggccgagggagttcggcaccatcaccgtcgaggccaggtcgccgctacgggtggcgagcttcatcaccacctgtgagtgggcgaaggcggagaagcccttgccgccgtactccttgggaatgatcaggccgaagaagccgtgctgcttgatgaaggcccaggcttcttccggcaggtccatgcgctggccgatgtcccagtcgctgaccatggcgcagagttcttcggtcgggccgtcgacgaaggcctgctcttcttcggtgagttgcgccttggggtagtcgagcagtttctgccagtccgggcggccgctgaacaattcgccatcccaccacacggtgcccgcctcgatggcctcgcgctcggtgtcggacatcggcggcaggactttctggaaccaggcgaacagcggaccgctgagcacgcgccggcgcaggtcgggcagggcgaggggaagcgccaccgccagccagagcagccagaagaccagcagcagccagccgggcgcgtggctgaacacgcccatcaggatcaggtaggcggcgctgatgccgagcgcgggagcgggtggggtacgccgatgggcgaggtaagcgacaccgagtaccagtacgactaaccagagcaacaacatgcggaatcctccatgaagacgccaggcggcgtctcgagcttagcccgtttgccgccgtttggcggcagggccggtcagcttggccggtttgtcacgttataggcgaaaacttcccgtttagactgggacaaattgcccgccgggagcccgccatgcagtcctacctacaatccggccgcttcgtggatagtgaccacccggtggtggtggagttcgcggaaaaatcccgggggaattcggcgaaaccgcgtgaccaggcggtcgcgctgtactacgcggtacgcgacggggtgcgctacaacccctacgtgttcagccgcgatccgcagaccctgaaggccagccacgcgctgcagcagggcgagtcctattgcgtgcccaaggccatcctgctcgccgcctgtgcccggcattgccggattccggcgcggatcggcctggccgacgtgcgcaaccacctggccacgccgcgcctgctggaggcgctgcgcagcgaggtgttcgccatgcacggctataccgagctgtacctcgagggccgctgggtgaaggccaccccggcgttcaaccgtgccttgtgccgcgccttcgacgtcgctccgctggagttcgacggcgtcgccgacagcgtcttccatccgttcaaccgccagggcgagcgctacatggaatacctggccgatcacggccagttcgccgacctgccggaggaactgttcttctcccacttgcagtagcactatccgcacctgttctccggccgcccgctggccctggacggcgatttccaggccgaggccggacaagatgaagggcgtcgatagtcaccatcagccggcgcgtcttccttcttcggtccatcctcggtagggtgcggcatgtcgtccgggcgctccggcgacccatccgccgcatcaaccgaagagggaacgcagagtatgttgaccatctggggccggaagaactcgagcaatgtgcgcaaggcgctgtggtgcgccgaggaggctggcctggagtaccggacggtggatgccggcggggcgttcggcctggtggatgagccggcgttccgtgcgatgaatccgaacggtcgggtgccggtgatcgaggacgacggcttcgtcctctgggagtccaacgccatcgtccgctacctggccgcccgctatgcgccgggcgacctctatccgcaggacccggtgcgccgcgccgacgccgacaagtggatggactggaccacctcgactctcgccgggccgttccgcgacctgttctggggaacgctgcgtacgtcgccggagcaacgcgacgaggccctgatcgcaaaggcgttgcagacctgcggcgagttgctgcgggtgccggaccagaccctggccggccaaccctggctgtccggcgaacgcttcggcatgggtgacattcccctgggctgtttcatctacgcctggttcgagatgcccatcgagcgcccgccgctgccccacctcgaggcctggtacctgcgcttgcgcgagcgcccggcgttccgcaccgcggtaatgaccgaactgacctgagccggctactgttgcattttgttacccgtagccttatctagctcttcctcttcaccttccgacacgggaagcctaatgagttccgccctgtccatccgtcaattgacgaaaacctacggcaacggtttccaggccctcaagggcatcgacctggacgtcgccgaaggtgatttcttcgccttgctcggccccaacggcgcgggcaagtccaccaccatcgggattctctcgaccctggtgaacaagaccagcggttcggtctcggtgttcggccacgacctcgacaaggacccggccggcctcaagcgttgccttggcgtggtgccgcaggagttcaacttcaaccagttcgagaaggtcttcgacatcgtcgtgacccaggccggctactacggcatcccggcgaagatcgccaaggagcgcgccgagcgctacctgacccaactgggcctgtgggacaagcgcaacgaagcctcgcggatgctctccggcggcatgaagcggcgcctgatgatcgcccgcgcactggtccaccagccgcgcctgctgatcctcgacgagcccaccgccggggtcgacatcgagctgcgtcgttcgatgtggagcttcctcacagaactcaaccaggaaggcatcagcatcatcctcaccacccactacctggaagaggcggagcagctctgccgcaacattgccatcatcgaccacggcgagatcgtgcagaacaccagcatgcgcgacctgctgatgaccctgcattcggaaaccttcctgctcgacctgaagaacgtccaggccctgccgccgaccctcgacggctatccgacgcggctggtcgacgaccacactctcgaagtgcaggtggagaagagccagggcatcaacgacctgttcgcccaactgggtgcacaaggcatcgaggtactgagcctgcgcaacaagaccaatcgcctggaggagctgttcgtgtcgctggtggagaagaacctgacgaggatcgcccgatgagcagcgaactgagcgccaacctggtcgccctgaacaccatcgtctaccgcgaggtgcgccgcttcacccggatctggccgcagaccctgctgccgccggcgatcaccatggtcctgtacttcgtgatcttcggcaatttgatcggccgccagatcggcgatatgggcggcttcacctacatggaatacatcgtgcccggcctgatcatgatgtcggtgatcaccaacgcctacggcaacgtggtgtcgagcttcttcggcagcaagttccagcgctcggtggaggagctgctggtgtcgccggtatcgccgcacaccatcctcctcggctacaccatcggcggcgtactgcgcggcctggcggtgggggtgatcgtgaccatgctgtcgctgttcttcaccaagctgcaggtgcaccacctgggcatcacggtgctggtggtggtgcttaccgcgaccattttctccctgggcggtttcatcaacgcggtgttcgcgcgcaacttcgacgacatctcgatcatcccgaccttcgtgctgacgccgctgacctacctgggcggggtgttctactcgatcaacctgctgccgccgttctggcagaccgtgtcgctggccaacccgatcctgcacatggtcaacgccttccgctacggcatcctcggcgtctccgacattcgcatcggcgtggccatcggcttcatgctgctggccaccgcggtgctctatctcggctgcgtaaggctgctggtgagcgggcgcggcatgcgccaatgaaacgctcgaaggcatgaaacagaagcccccgtcatgggggcttcgcgtttcatcggcgcgggcgagcgaaatcgatgacgaaacgggtccagccgtcggcagactcgcagcggatctcgccgccgtgggcctggacgatggagcggcagatcgccaggccgagcccggcgtgttcaccctggccttcgcggcgcgccggatcggcacgatagaaccggtcgaacaggcgcggcaagcgctcgggaggaatcgccggaccctggttctccacgctcaggcgccggtcgccgagacggatgcggatctcgccgccatcggcggtgaagcgcagggcattgtccagcaggttggccagcacccgccgcagcatgccgcggtcgcccggcaggctcaggctgccttggcgcagcaggcggatatcgtggtcttccgccagcggctggtagaactccagcagcgagtcgacttccgcgcccaggtccagggcctggcggctgggcgccagcaggccgtggtcggccttggccagcaacagcatgtcgttgaccatcgcggtgagccgttccagctcctcgaggttgccgtgcagggcctcgcgataatcctccagcgagcgtgggcgggacaataccacctgggtctgggtcagcagactggtgagcggggtgcgcaactcgtgggcgatgtcggcggagaacgccgagaggcgctggaaggcttcttccaggcgcgccagcatggcgttcagctcgccggccagtccgcgcagctcctctggcatccggctggcgtcgaggcgggtggtgagggagttggcggaaacccgcgcggcgacttcgcgcatccgtcgcagcggcgccaggctggcgccggtggcccaggcgccgagcagcgccgtggccagcgccgacaggctcatggtcagccagatcaactggcgcatgcgttgcaggaagtgctggtgatgactgatgtcgaggatcacggtgagtcgcggcgaagcgtcgttgccgggctccagcggggcgccgagttcgcggttggcgggcaggccgggatgcgcaggctgcggcaggcgctcgaaccagaggttgccatccgggccgttcagacgcaggccgaggtcgggatggcgtgccagttcgcgcagcagttccgcttcgcggcggcgcatctgttgttccgagccgaggccgcgcagctcatcgcgaaacaccgcgagcttggcggacatcgccatatggtcgagctcgacgaaatgctcgtcgatggccctgctgaagatcaatccggcgatcagcgagaccgccgccgtgcaggcggcgaacagcaggctcaggcggacgccgagggacatccgcgagccgaacccggcgctcattcgtcgcgctcttcgagaacgtagcccatgccgcgcacggtatggatcaggcgctgcgggtagtcgtcgtcgaccttggcgcgcaggcggcggatggccacctcgatgacgttggtatcgctgtcgaagttcatgtcccagacctgcgaggcgatcagcgacttgggcagcacctcgccgctgcgccgcagcagcagttcgagcagggcgaactccttggcggtgaggtcgatccgcttgccctggcgttgcacccggcggcgcagcaaatcgagttcgaggtcggccagttgcagggtggtctcctgcaactgctggctgccccggcgcagcagggtgcgcacccgggcgagcagttcgacgaaggcgaacggcttcaccaggtaatcgtcggcgccttgttcgaggccgcgcacgcggtcctctacggcatcgcgggcggtcaggaacagcaccggtacggtcatcccggcgtcgcgcacgctgcgcaggatctgccagccgtcacggccgggcagcatgacgtcgaggatcagcaggtcgtagtcgccgcccagggccagttgctcgccctcgttgccatcgtcgctcaggtcgacggcgaagcctgcctcggcgagcccctggcgcaggtactggccgatgcgcggttcgtcttcgacgatcagcagtttcatgttcatccctcgttacatttgccggccatgccgacctgtttctgacagcatcgtaatcagtgggtaacgggggcgacagtggcccccgcgcagactacaggggaactcattcgaggagacttcccatgcgtaccttcactgcctccaccctcgctttcctgctggtcctcgccccgaccgttccggccatggccgacagcggcggcgacatcgtcttcgagcgcatgcaggcccaggccgccaaggctcgtgccgcgcaccaggagaaactggcgaagcaggccgaagcgacgaagaaggacaaggaaaactgctgatcgccagttcttccacccccggctccacacgggatgacggagggctccgatcccgtcttcacccgccaccggttccctggtttccggtcggcgggttttttatgcccgtcggtggcgctgggcgatcttagccttcgcggtccgcaacggcggcaagctgacaaagatgtaatgctcccgacagccagccggcaggcgcagcgacacaggataggcgacatcaacccgatggagattccccgtatgtttccgcgccgcctgcttcccgcttccctgatcgtcctcggcgtgcttttcggtgccagcgcccaggcttcgccggcccacggccaggccttcggcaagccggcccaggccgcgcaggccagccgcagcatcgaggtggtgctcggcgacatgtacttcaagccgcgggcgatcgaggtcaaggccggcgagacggtccgcttcgtgctgaagaacgaaggcaagctgttgcacgagttcaacctgggagacgcggcgatgcatgccgagcaccagaaggagatgctggagatgcagcagtccgggatgctcaccccgaccggcatggcgtcgatggaccatagtcagatgggccacggcatggccggcatggaccatggccggatgatgaagcacgacgaccccaacagcgtgctggtcgagccgggcaagagcgccgagctgacctggaccttcgccaaagccacccggctggagttcgcctgcaacatccccggccactaccaggccgggatggtcggtcaactgaccgtgcagccctgagccggcggacggccggcgtgaagatgccggccgatccgtatacacttgccgccgcccgccagtgcggcgcggcgcgcggggaagggccctgcgcgattcatccagcaggtttccctcatgcagcatcccgccgaacattcgccgctgggcaagaccagcgaatacgtctccagctacacgccgtcgctgctgtttcccatttcacgcacggcgaaatgggccgagcttggcctgagcgccgagaccctgccttatcgcggcgtggatatctggaactgctacgagctgtcctggctgaccccggccggcaagccggtggtggcgatcggcgagttctcgatcccggcggactcgccgaacatcatcgagtcgaagtcgttcaagctttacctcaattccctcaaccagtccgccttcgatagtcgcgaggcgcttcgcgcggtattgcagaaagacctctcggccgctgccggggcgcccgtgggcgtgcgcctgcgcagcctcgacgaggttgccgaggagggcatcgggcgtctgccggggcgctgcatcgacgagctggacatcgccgtcgacggctacgagcagccgcgcccggaactgctgcgctgcgacgccgggcggatcgtcgaggagcagctctacagccacctgctcaagtccaactgcccggtcaccggccagcccgactggggcaccctggtggtcgactaccggggcccggcgctggacccggccagcctgctggcctacctggtttccttccgccagcaccaggacttccacgaacagtgcgtcgaacgcatcttcctcgacctgcagcgcctgttgcagccgcaggcgctcagcgtctacgcgcgctacgtacgccgtggcggcctggatatcaatccctaccgcagcctggcggaggtcgcaccggacaaccgacgcctggtgcgccagtaacgcctcgcaacacgcggatacgaaaaagccccggccatgccggggcttttcatttcggcaagtcgttcagatacccatgttggccaggctctgcacgatggagcggagcgtgccggcgagggtcgggtggctgacctcgaagcgctcgacggcgaggttgaccccatcgaccaggctgccttcgttgagggcgtcctcgttggccagtttcagttcgatgtccctgatcaggagttccagttcggcgcgctgctcttcgttcagcggcggttgttgctccagttgctcgcgcagggcggatagttcgcgcagcagactctctttcggcatggtatttccctcgacgtacaagtcttcggtggacctccggcgggcgccgaaaggtccgtccatgccgaacagattaacctgtcgggcgcagatgtgcgcgatccggatcaatccgcagcaggcgttccagcagcgggaagaagtgcgtcagttcgggggtgcgcatggccgggtccttggccaggtcgtcgaggcggcgcagggtcaggccgtcctgggcatagggcgccttgatgtaggccgcggcggcacgctcgtcgaacggcccgccttgcagcaccaggctgtgccgggaggccggcgacaggctggcgtggtagctcgggtccaccgcgcagagaaagcgcttggccgatacgtgcaggcgcaccggctgccagaccgactctgggaacagctcgcgcagcaggcgtgcgccgaattcctcgtggcgcaggtcctcctcgtcgatctgcgccgggtcttcgtagaggtggccgatatcgtgcagcagggcggcgactacaaggctgtccgagcaaccggcgcgctcggccagggtcgcacactgcagcgcgtgctcggcctggctgactgcctcgccatagggctcggcgccatggctggcgaagcgttcggccagttcgtcgagaaagcggtgacgggcgcggctcatggtttttctcctttcaggcggcggacggcgaggtcgtgcaggcagggttgcagctcgcccaggtgatcgatcacggaatgcacgcccaggcggtacagttccagggtggcgtcggcgcgcaagcggtcgcgctcggtatgtccgagagcgtcccagtcggctggcgagaggccgcacgacggcccgctggcggccaggccgatggtccatagcccggcattgagtccggcctggagttgacgcggttgggcgctgaccagcacgcagccgtcgaggcgctcgatgcccagccgggcgagggcctgccagcagccatcgggggccggccaggggcgcgcgccggcgagggggatcagggcgtccgctcggccgagcggcgcggcaaggcgctggcagaccgattccggtagctcgtcctgccaggcgtagggaatccgttgttcgtccaggctctccagcagggccacggcaccggcgatggcttcggcctgttcctcggcggcttcgtcgagggcctgctccaggcgctggcgctcgttcttgttcggcttgcgctgcaacaggaagctttgtgcctcggcgaagggcagcagactggcgtcgcggaggtgttcggcagggctatgcggatggctgcgcagcagcgccagggacagggtccgggcgccgaaatccaccaggccgccggagagtccgaagagcagggcggtgaagcgcgggagttggtcggagctgggcatgcgaaaggcgtctggcaaatggtctaggccagcctagaggggttttgtgacgccgccgtgacgttttcgtggcagtggcgataggccgacgggctgccgttataatcggccggtctgaatcagcgaggccgtcatgccggtcgatcaatctcgtcagtacctgcgcatccgcgaccagctcgccgcggatatcgcccagggcgtgctgcaggtgaaacttccctccgagcgggagttggccgagcgcttcctgtgtacccgcatcacccttcgcgaagccctgcagcaactggaaaccgaaggcctggtctatcgcgagaaccgccgcggctggttcgtcgcgccgccgcggatccgctacaacccgacccgtaccaccggcttcatggaatacgtcagcgcccagggacgccagccgcgtaccgagacgttgcacgccgagcggcgagcagccggcgcctggctggccaagcggatggggctggaggacagcgcgccggtgtatttcctgcaacggcgccgctgggtggacgagcgtccggtgctgatcgaactgatcgccctggatgccgggtggtgcccaggcctgctggaccacgacctcgatacttcgctgatgagcctgctgcgcgagcgtttcggcctgcagccgacgcgctgccaactggcgatgcatccgaccgcgctgaacgcggcccaggccgagccgctgcaactggcgccgggttcgccggcgctgtacctggagcgactgagttacgcggaggggcagagggtggtcgagttcgaccaggagttctggcgcccggacgccctggagatcgtgctcgacgcggcctatccgggcgcctgagtcaggcgatcgcggcgcgtatgctgtccggcacgggcgtcgagcggttttccgcgtggcgcacccagaccagcttgcagtggccttcgccataggtgccttgcggatcttccagggtgctcaggcgatgttccagtaccaggctgctggtgcccagcttgccggcgtacagttccaccaccacggtggccggatgcaccaccggcttcaggtaggtgtgcaggctttgcagcaccaccggcccctcggcagcgccttccaggtcgacgccgagggtttcgaaccaggccacccgggcctcttccaggtactggaaatagagggtgttgttgacgtgcccgtagctgtccatgtcgccccagcgcaccgggatatgggccgtgtgtagcaattgtctgtcagccatctcgtaactcttctagtctcaaaatcgatgcgagcctatatactgcgcgcacgctgaagccgcgctggcggccaagactagtcatgcaaaggagatacagcaatgcgcgcccgcggcgtgaactggatcgaacgtagtgcccgaatcctggcttgcgccagcctcgcattggcacccacgctgtccctggcggccagtgaagaagacccttgggaaagcatcaaccgtcccatcttcaccttcaacgacaccctggacacctatgcgctgaaaccgctggcccagggttaccagaaggtcaccccgaacttcgttcaggacggcgtgcacaacttcttcaacaacctcggcgacgtgaagaacctggccaacaacctgttgcaggccaagttccacaatgccggtgtggacaccagccgcctgctgttcaacagcaccttcggtctggccggcttgatcgacgtggcgaccccgatgggcctgcagcgcaacgacgaggacttcggccagaccctgggctattggggcgtcggcagcggcccgtacgtgatgctgccgttcctcggcccgagcacgctgcgcgatgccccggcgaagatcccggacatctatgtcggtccctaccactacatggacgacgtacgcgcgcgcaacgtgatgttcggcatcaacaccgtcgacacccgtgccaacctgctgaagtcggaaaaactgatcagcggcgacaagtacatcttcatccgcaacgcctacctgcagaaccgcgaattcaaggtcaaggacggcgaggtggaggacgacttctaagtcgacccgcttcgtgcgacacctggaaaggcggcccttgagtcgcctttcgtcgtttcagtggatcgcgacgatgctcagccccaggctatgccgacccgggccgaggcgttcgcagcgcaccacgcgggcttccagttccaggccggtgagcgtctcgtgggtggacgggatgctcacccgcaggtggtcgcccggagccagttcgctttgcgcttccagcagcagcccgctggcggacaggtcccggcacagggccaccgactcgcggccttcgcagcggatggtgaccggggtgtcgagcttcatgcggatgaagtcgcgcttctcgctgtagttgtgctcgatgggctgcatgggctgatcctcatggtcggggcgatgggagggcgactggcaatcctggcgattatcgtcaaagtttataccgtgcggacgggatcggacggacaaaggcggattttccggcaaaggtcaacggcttgaactgctcaacggatgggagtaccgtctgcgccttgtcgaaccccgtagccgcgctgttgtcacttacaataagcgcctaggacccactgtttccggcgccgtttgcctggatgacccatgcataaagtcagtgccacgctgctgatcatcgatgacgacgaggtggtgcgcgaaagcctcgccgcctacttggaagacagcaacttcaaggtgttgcaggccctcaacggtctgcagggcctgcagatcttcgaaagcgaacagccggacctggtcatttgcgatttgcgcatgccgcagatcgacggcctcgaactgatccgccgcatccgccagaccgcttcggaaacgccgatcatcgtactttccggagccggcgtgatgagcgatgcggtggaagccttgcgcctgggcgccgccgactacctgatcaagcccctggaagacctcgcggtgctcgagcattcggtgcgccgggccctggatcgcgcctacctgcgggtcgagaaccagcgctaccgcgacaagctggaagccgccaaccgcgaattgcaggccagcctgaacctgctccaggaagaccagaacgccggccgccaggtgcagatgaacatgcttccggtgacgccgtggagcatcgaggggctggagttttcccaccggatcattccgtcgctgtatctctccggcgacttcgtcgactacttccgggtcgacgagcgacgcgtggcgttctacctggccgacgtttccggccatggcgcttcctcggccttcgtcacggtgctgctgaagttcatgaccacgcgcctgctctatgagtcgaggcgcaacggcacgctcccggagttcaagccgtccgaggtgctagcgcacatcaaccgcggcctgatcaacaccaagttgggcaagcacgtgaccatgctcggcggggtcatcgacctggagaagaacagcctgacctacagcatcggcggccacctgccgcttcctgtgttgttcgtcgaagggcaggcgagctacctggagggccgtggcctgccggtgggcctgttcgacgatgcgacctatgacgaccgggtcatggagttgccgccttccttcagcctgtcgctgttttccgatggcatcctcgatgtgctgccaggagctacgctgaaggagaaagaggcttcgctaccggaacaggtggcagccgccggaggcaccctcgacgggctgcgccaggtcttcgggctggccaacctggcggagatgccggatgatatcgccttgctggtgttgagcaggaaccttgcatgagtaccggtaaaatccagtttgccgaacagaacggctccttcgttctgaaattcgtcggtgaggtccgcctcaccctgtgctcggccctggattccaccatcgaaaagatcttcgctgcgctgaatttttcggcgatcatcatcgatcttacggaaacccagagcatcgatagcaccacgctcggcctgctggccaagctgtccatcctgtcgcggcagaaaatcggcctgttgcccacgctggtgaccaccaatccggacattacccgtctgttgcagtcgatgggcttcgatcaggtgttcaatatcgtcgatcgtccgattccgtgcccggaatgcctgtccgacctgccgccgcaggaccagtcggaagatgtggtgcgcgacaaggtcctggaggcgcaccgcatcctgatgggcctcaacgaatccaaccgcgaagccttccacgacctggtcagcgccctggagcgccattaaccggtcgatcccttcccgaattcctgctgaatcctccgctgcgccggaacgggacgccctgcatgcgcgtcccgccggcagcggcgatcagtggcgggtcgccaactggtattcgagcttttcctggtcgcgtgcgaacaggcggatgccttcggccagcttttcggtggccatggcgtcctcgttcatctgccaacggaaagcgctctcgtcgagcacctggcgcggctcgccttcgcccggcagcagcaggcgtggcagctcgccctgggcgtcagccagttgttgcagcaggtcgggactgatggtcaggcggtcgcagccggccagttgctcgatctggccgagattgcggaagctggcgcccatcaccaccgtcttgtagccgttggccttgtagtagcgatagatgcgcgagaccgactgcacgccgggatcctcggcgccggcgtagtcgcggttctcgctcttcttgtaccagtcgtagatgcgcccgacgaacggcgagatgaggaacaccccggcgtcggcgcaggccaccgcctgggcgaaggagaacagcagggtcaggttggtctggatgccctcgcgttccagaatctcggcggcgcggattccttcccaggtggaggcgatcttgatcagcacccgctcgcggtcgatgccctgttcgtcgtacagctcgatcaggcggtgggcgcgggcgagggtggcctcgctgtcgaacgacaggcgcgcgtcgacttcggtggaaatacgtccgggaatgactccgaggatgtccttgccgactgccacggcgaagcggtcgcaagccagtccggcgtcgccgccgctacccgcggtagcctgtcgaaggtgctcggcgtagcgcggcagggcggcggccttgagcagcagcgacgggttggtggtggcgtccaccggcttcaggcgggcaatggcatcgaagtcgccggtgtcggcgaccaccgtggtgtattgcttgagttgttccagcttcgaagtcatggcgaggtcttgtcaggtgggttcttgggaagaagaattccccgaccttacccgagccgcaggcgcggctcaatgggagctatcgccccgccagaagttccagcgcctggtcgaaaacccgcagcggatcggcggccttgtgcacgtccaccgagagcagttggcggaatcgccgggagccggggaagccctgggccaggccgaggatatggcgggtcacgtgatgcatcgcgccgccttcggcctggtgtcgctcgatgtacggacgcagacggagcaaggcctcgctgcgactgagcggcggcgcttcgctgccgaacaactggctgtccaccgcggccagcaggtaggggttgtggtaggcctcgcgaccgagcatcacgccgtcgaaggtctgcaggtgctcgcggcaggcctcgagggtcttgatgccgccgttgaggacgatctccaggtccgggaagtccttcttcaattgcgccgcgacctcgtagcgcagcggcggcacctcgcggttttccttgggcgagagcccttcgaggatggcgatccgtgcatgcaccgtgaagctccggcagccggcctcgcgcacctggccgacgaaatcgcagagctcggcatagctgtcgcgcccgttgataccgatgcggtgcttcaccgtcaccgctatctccaccgcatccagcattgccttcacgcagtctgccaccagcgccggatgccccatcaggcaggcgccgatcatgttgtgctggacccggtcgctggggcagccgacgttgaggttgacctcgtcgtagccggcctcttccgccagccgcgcgcaggccgccagttccgccggcacactgccgcccagttgcagcgccagtgggtgctcgcattcgtcgtagcggaggaagcgctggcgatcgccgtgcagcaacgcgccggtggtgaccatctcggtgtagagcaaggtgtgacgggacaactggcgcaggaagaagcggcagtggcgatcggtccagtccatcatcggcgcaacggagaagcggcgggagagggtggcgggtgtggtggtcggttctgggcgcatcgggacttcgttagggagagcggagcagggcgagggattttatcagggatggaggtggaggaggggcgggatgagcgtgctagtgtgaatgcgtgcaagagccggggctggtgggatgccgagatgattataagtctgccgtcggtccggcacctgtattcattcatgagtttttcatcagaaatttttttcaatatttatttttgaagaattttatagctggccgggtagtcaaggtttgtagggtagagctgttgagtggggcgagtgtgttggcctaatttgaccgaaggagtgaaggatgaatacttattttgatattccgcatcggctggtgggaaaggctctgtatgaatcatattatgatcattttggtcaaatggatatattgtcagatggaagtttgtacctaatatataggcgggcaacagagcatgtaggtggtagtgatgggcgtgttgttttcagtaaactggagggtggtatttggagtgcgcctaccatagttgcccaggcgggaggacaggattttcgagatgtagctggtgggacgatgcctagcggaaggatcgtcgcggcctcgacggtttatgaaacaggagaggtgaaggtctatgtatctgatgattcaggtgtggcatgggtacataaattcacattggctagaggtggggcggattataattttgctcatggaaaaagttttcaagtaggggcacgctatgtgattcctctttacgcggcgacgggagtcaattatgagctgaaatggctagagtcttctgatggcggagaaacttggggcgaaggaagcacggtctacagcgggaacacaccatacaatgagacttcttaccttcctgtgggagatggcgtaattctggctgtagccagagtaggatctggtgccggaggagcgttacgtcagtttataagtctggacgacggcggcacatggactgatcagggtaatgtgactgcacaaaatggtgactctaccgatattctcgtagccccttctctctcctatatttactctgagggaggtacaccacatgtagttcttttgtacacgaacagaacgactcatttttgttattacagaacaatcctgctggcgaaagccgtagcaggctcctccggctggacggagcgtgttcctgtgtatagtgcgccagccgcctccggttatactagtcaagtcgttttgggaggtcgaagaatactgggtaatctattcagggagacgtcttctacgacgtcgggagcttatcagtttgaagtgtatctgggaggagtcccggattttgagtcagactggttttctgtttcttcaaatagtttgtataccctgagtcatggactccagaggtcgccgcgtcgggtggtcgttgagtttgcaaggtcatcgagtccatcaacatggaacattgtcatgcccagttatttcaatgatggagggcataaaggcagtggggctcaggttgaagtgggtagcttgaatattcggcttggaactggagcggcagtatggggcacgggatatttcggaggaatcgacaatagtgccacgactcgattcgctaccgggtattatcgggtcagagcatggatttagctgcccactgactagaaatcaagcggagcgattgctgaatcgcatctaccggacgggcaggaggtctagcttgctcggcccattaaaaactgcagcggtaagggtaggctgcgaccgtttttcagtcactgacaaaacctccgtaatatagtgcttacacctggtacatctggatactctccgaagagactggcgtggcctcaatgcgcgcgggattaccactcttccggatgtgcacgtttcccgagcctggcctgccagacaacgccgatcccaacgcctggaggtctgcgtaggcgtagaaccaacgagggccggcgggctgtggcagctcctggccctgttggcgcgtctttgcgggttctagtccatttgaaatattgcgatcctggcatgggccagtaagatgggccgttcgacgacccgcaccagcctctatcaaggatcgatacatgagactgtcccgcccgcgttttaccctttccgccgccttgctgctttctctttccctttccggttgcgtgtctgaactcgattcgggcgcctatggcagcatggacgatccgcgcaacgcgcagatgctggacctggtggaccaggcgctgaaggggaacatggccgtggtactggtggccgacgtgatgccgcacaagtccctgagcgatgccctgaccatgacccagtggacgccaacggcgatctgggagtacgagaaggacccgaaggtgaccttcggccgcaagttccagaccaacgcgctgcagcggaagcccgacgagacctatctgttcaaggccttcgaggtgcatatcctgccgcccggcaagtacctgctgaccggcggcgacgactaccagatccatggcttgctcgaccaggtcggcgcccgcagcggtccgcccggttcgggccatggcgccaacggcaccgcgtacctgtcccccgagctgtatcgcgagtactaccgggaagaagtctggaaagatgccacctatggcagcgagatcaagaccgagaaggtctgcaccgccgtgcatgtggcctcgggcgcctgcgtgagctggggcgagcagcaatacacgcagacgacccagggctcccaggccggctattaccagcagaccgattcccgcgacgtgccctcgatcaaggtccaggcgcgcctgccggtcaacaaggcgctggccagcttcaccgtgcagggcgggcaattgctgctggccccgcgcatgcacctgaagacccccggctacaagtaccagcagtcgaagtgccgggcgatcgatccgaagaagatcgaatgcccattggaaaacctgaccgtctacacctggccggcgccgatggacttcagccagtccctgatcgcccagcgggccctgagcgacaagcaccggcaactgctgtccaggctccagcccctgcagatcacgccgctgcgcaagcagggcatggaagacccggtctggggcgtgccgctgtcattgaaatagcgggtgttcgctcaggggggcgccgggtgccgcccctgtccacgatcggcagggaagcatttccccacaaggaaggtgacatgaacgtatatcgcaaggtttcccgcagtgccgcgacttggctgtgcgccgcgctgctggccgcatccggccatgcctgggccgaagactggtgggtggtacacaagggcgacgaccctgccgagcttgacgtgttcctggccgatgccgattcgctggcacccgtgccgggtatcgaaaacgcctggcaggtgcagatcgccatgctgttcgactccttccatctgctcagcgcgcaccagtaccgctgcgatacgcgagaggtgaaggtggtcaacgccaagaccttctccaacaacgggcaacccacgaacctccagttcaccttcgccaagggctggaccccgctgcccaacgaaagccatgaggctgtcctccagttcatctgcgcgccgcaggagcgcgaacgcaatggcatgcgctccaccggcaggggcgtgccattgcaggcggtgatcaccgccgtcggcatggtcgagatggagcgcgcccaggccaatctcgccgaggcccggcgcaagctcgaagaggccaagagcgatcgcgtcatgggcgaactcgatcgtctgctcggcaacgaaccccggaagccctgagccgctctgactgaagcagggtgaggcgaggcggatcgggccgttttccggagcgatcggcgtaggtccggaaggcgcgtcgggagggtctcgatgaggtggtatagccgcatcagactgggactcagcctcgcggtcgcgagcgctttcctggtggcgtactggcgatcgctcgacagccatggctatcccaatataaatgcgcccggggctgttcgcctacctgctggtctttcctgcctgcgccctgttgctgcattccactgcgttggcattcgtgctccagcagcgaaagctggggagcgctcgcgaaagagcgctgcaatggacgatcaacctggtgctgtggatggcgccgctttgttatgtccttgccagcgtctagcccgatgtacttcccctcaacccgcagagcgacaagccatgagggccgtttcatcattttcctgggggcaatgagtgcgttgtccatttcaatgggtggacgttcagccggccccgccagtaaaccgtgtagcgtagcttcgttttcgcaggaatgatgccgagattgggacggaagttgatgtcacggtgcgatggggctcagaggacttggggcggtggggctttgtcacgatcccggtcatatcatgggctgctgacaagggagcatggcgattgcggctgcccttttcccggtgaagtgcgaaacggatttttcaggaggaagcatgagctacgacacgaccggttccatggtgggggccacagtaggagaccctagcgatgagcgatggaatgcgttgattgacgaaaccgacctcgtaaagggcgcatcacttataggcagatcggcaatggttttagccagcctggccgatcttccagatgttccgcaaagctacacccatgagtacatcgttcaaggccacagacccggtattaccactggtggtggcaggttctactgggatggggcggttgcgcggaatcgccacaacggcgggactatcatcagccccactgttcctgcgtacactgcccagacggggttggctggctatctggatggctcgggggaaactgagccgtccgcctttggctgctttgtccgcaaaatcgaaggccatggtattcgcctcgaatggttcggctggctgccgggggaactcgctaccgcgccagcgcaaaagcttctgcaacaaacccgttcgaacgaaggctctgcggcccacatcggttacacggccatgtttcccccggcgaccgttcgctccggtccattggttatcggttcggaccagatcatcgccggaaccagccggactgtcattctccaggagcccggtacggtgacgatggatgtccagccgttcatcagcatggccggacagagcaatgtgttcatcttcggcaatggaatgcagatcaatggacagaagaacgaggcacgcagcggcgaaggtcgatatggacttttcatctatggctcgaaaaaagtcctggtccaggacctgacaatcaacgcgttctccggtgatggattggccgttaccggcgatgcggggcgaccaagcgaagatgtacgcatcgaccgagtcctttgcaacttcaatggacgcaatggcttttcggtcatcaatgccaggcgcgcgacgctgctgaattgccgagcgactaacacgaataccaatggacttggtgcatcagccaatggaccctgggcggccttcgacatagagcccaatgaaggaagcggttacttcatcgaagatatcaacctgatcggttgttcgagcgagggcaatgctgggaacggactccagttcaccatcccgaatacggactcccctgtctccgtcagggtctccggattccagtcccgacgagacggttcggctactcaatacggggcgaagaatggcggagtgggtttcatatatggagggggcgtctctccgaaaaacactatgtcgggtctgatccaactggttggcatcgttgtcgacgagccttttggcagcgctatgcgtttccgcaactggagcgccagaaacgcgccggtactcatcagggatgtcacgataagaaatgtgaacttcggcgtggccacgggaaacataaatcgatgcggagtctggcaggactcttctgactccatggaagtgattgaaccaaagggcaatttcgaagtggatgggctgaccgtcttcgacgataaccaacagctcattcgacccgtgtggaccatgggaatagtggcggctcctacaatcgccaaggtgaggaatgtctacgtcaaccgacatggctatcctgctgttttgccgttacgtacgaaagtacaaggaggcgtagggtggagcgagctgccgatggtgtccttgtcctcgtcctcagcaatcgcaggaacggattatgtcggacaaatggtcgagttgacggggagcggaggattcgtactgccggaggccgctcttgcctcgggctgtgtcttcaggatcaggaatggttcgagcggcagcatcaacgtcacggcactggctggaggaatcacgggcagtacctacggtagctacaccaacacaggaagcagcctgaccttgaacaatgggcagtatgccgagctatggagcaatggaagcacctgggtcctgaaatgacgcgtaaaccttttatttggcttgcctccgactgtcatggcgtatggtcggtatgccaggacagcttttcgagcggctcagcgcttcggcgcaaagaccatcttcaccggcgcatcgtgcttcaggcgcgagccgttcggttggttcccgggctcgaagctagggtgccaggccctgagttccgtatcggacagccactccagttgcaattggtccgcggatgcgcgcaggtcgaattgcgccagcgaccgcacgactgcatggcacttttccgatttcccggtttcgaggagggagacctgtatttcttcgccccaggtgatcgaacctttctccgggcatttccgaacctcgacgtggtattgcccgttcggcgacggcaggtcggaaatcagcttgtcggggccgcacgcggcgaggagtacgctcagtatcagcagggggctttttttcatccatgacctctgtggaaatctcggaaaggaattcctctcttttcctggcggaaaatgggcaggaagcgggcctgcccatcctacgcgcggactgctggatctgcccatgggcgatccacagcttcgtgcacgagcgatatcagatggcgctgagcgatttcaggatcagataggtgcagatgagcacccctgccatggacaacaggcccagggcgacaatgctgagtttcatcgggtttcctcgttgaactgcgatgggctgctgtatcaaggaggggagaggcagcaggcggggggaaagccccggagggatgagcggcctccggggctttggtgaccaccataggagaaagtcacattgataaggctagccttgtttcgctgtgcggcaagcgaagcggcatcgcttttcccgcaggatcgggaaaatgcctagccataccgcagtgatggccacggagggtccatgcgcctcgtccatttcctgattgcccttcccgccgcgctgctggctgagcctcagataaccgcgcggcgcaggttcagcgttcgtcgccgatctccagttcgatgaagtcgatgacccctgccgcgcggttgtcgaggcgctcaagttcctggccgtccagcgtctgcaacagcgagacgccgtgttccaggtgctcgccggaggcatgcgaagcggcttcgcgggtaggactgaacagccaggcgtgcggatgttgcgcgcgccaggcggcgcggggtgaaaggctgacctcggtgcctgccgggtagtgccaggcgcccagttgcaaggcctcggcgaggaccgtaccgccgaggccgtacaggcggcggtcgcggtcgaaggccagggcgccgccgctcagcgcgatgccgcgcaccgacacccgttgcccggtttccggcattacccgccagcgctcggcgtcgcggtagccgtcggtgtagaccatgccatcgctggcgaacaatcgcgcaccggcggggaagtcgatgtcgtcggcgcggttgccggtcgccaggctacagccttcgaaggcggcgggacgcccgtcgcgctcgctggcgaaggcgatttcctggctggcgtcgcaacgccagccttcgatctcggcgactccctcgccacgcaggcgcagcgaagtgggatggacgccggtggttttccatgggtcctgcgggttgtcctgctcgctctgcagccagcgttgcaggtggcgggtggcgacgccgcggatcgtcaccggggtggggaattcggcttctcggaagctttccggctggtgcttgagttccagcttcagccgggtgccggcaggcatctcgatgcctccgaggcgggtagggcgctcgagcacggcgctgtgcgcggcttcctcgcgtgcacgttcgcgctcgtactgccagagaccgatctccagccaggcgcgcagtcccaacgggatcagcaggagcagcatcagcaggccgcggctcggccagcggcggcgcaagcgctggcgcgcgcgcgggctgaaggccaggagcgatagccagaccagcagccagatgccggcgacgaacgacgacaggtagatgagcgggacgatcaggggaataggggcgacggggatcacgcgggcgtccttgcgggttgggttccatgacgtctccggcgcggcgtgccgggtacctgccagagtttacagggcgcgtcccgatgccgcagcggcaaactgtcttcaggccttgtccgccgggggccacgccctggagagggaggcgctcggggatggagtcggcgaagtgccgattcaagcccaggcgcgacgggccgatggggtggttatcggtttctgtagtccagtggggaaaaaccaatgaacgaaagcgtcgccagggtgttcgatcggattctacgggggctcgggttgaagaccctgaacgcccagttcctgctgtcctatgcactgatgttcggcctggccgcctgcgcctcggtggcgttgtacctgagcatgtcgatctcgccggaaaccatcaacgtggccggcgcgcagcgcatgctcagccagaagatggcccgcgaggcgctgcaattgcgactcggcgccggcgacccaaaggccctggccgcgaccatcgcccagtacgaacgctcggccgccgatctggatgcgggcaatgccgagcgcaacgtgagccggatgggcgcgccggagatcgccgcccagcggcagaaggtggcgcagatctggggccgctaccgggccatgctcgaccaggtggcacagcctgccagccaggtcgatctgcgcggcttctcgcagtattccaccgagctgttgggcgagctgaacaacctggtctcgctgatgagcgcgcgcgccgacagtgtccagcacacccagatgtggatcgccttcggttgcctgttggcgatcctggtgctggtggtgctcggccggcagttcggcctgccgccgctgatgcggcagttgcgtgggttggaagtggcgctgaccgaggtcggcgcggcgaacttcacccatgccctggcggcgggccatgcggacaacgagatcggccgcatcgtcgctggctacgagcggatgcgccaggacgtcagcggtttgctggcgaacgtcaagcgcagcgcggcagagaccgacaaggacgtggccgaggccctggagcaggcgctcggcgccggcgaccaggtggcgcgccagcaccaggacctggaccaggtggccaccgcgatgaacgagatgagcgccaccgtggccgaggtcgcccgccacgccaaccatgcggcgcactccacgcgtgacgccgcggccctggcccacgagggacggcgtctggtggagcacgccagcagccagaccggtgcgttggcggaggaactggaacagaccgccctggcgctgaacaccctgcaccagcatgccggcagtgtcggccaggtgcttacggtgatcagcagcatcgccgagcagaccaacctgctggcgctcaatgccgccatcgaggcggcgcgggccggggaggccgggcgcggcttcgccgtggtggcggacgaagtgcgttcgctggccaaccgtacccagcagtcgacccaggagatccaggggttgatcgagcagttgcaggacggcgccaacgatgcggtcgccgccatgcgcggtagcgccagccatgcccagagcaacctcgtcgaggccgacagcgcggcccaggcgctggggcgcatcgtcgccacggtggaagaactggacggcctcaaccagcagatcgcgaccgccgctgaggaacagagccaggtggcccaggacatcgaccgcaacatcaccaacgtctccggactctccgagcaggcccacgaagggaccgccgcagtgctttcggccaaccagagggtcaaggagcacatggctggcttgcgcgtggtgctcggtcgcttccgtacctgaggctggctgcgggcgtcggcgctagtcggcggacagctcgcggatcagcgccaccgtcaggtacaggcggggggcgatgctggatagttcgaggtattccgcctcgctgtgcaggccggcgccgaccacgccgagggtttccagcaccgccggtttgtcgctgccgggcacgtaggcgtagccggcgtccgtgccgaagcgcatggcgatcggctcgatgcgcttgccgattcggccgtagagcgtctgtgcggtttccgccaggcgctgcgaggcggggttcttcaccagaggcggacgacccttgtcgagacgcagactgacttcggtatcggcgaccaggcgttcgccggtcagcttccgggcgtcggccagtacccgctcgctctcggccgggtccgagtagcgcatgtcggcttccgccgaagcctcggcgggaatgatgttgcgcttctcgccgcccctggcgagggtccagttcagcgtggtgcctttcgccggatcgccgaggtccttgagacgcagcaactggtgcgacagttcgagaatggcgttgcggccttgctcgggtgccgagccggcatgggacgagcgacccttcacctcgagcagcaggccgtcgatgccattggtggctaccgtcactgcgtcccggtccggcggctcgtaggagaagacgtagtcctgctgccgggccagctcggcgatcagttgcttcgagccggcggagccggtctcttcgtcgggattgaacagcacggtgatccgtccgtagtccctgaagccttgctgcctgagcagcgccagggcatgcagcaccaccgccacgccgcccttggcgtcggccacgccgggtccgtaggcgcgctccgcgtcctcgcggaacggacgcttcgccgcgctgccggcggcgaacacggtgtcgtagtgaatcatcagcaggaagcgcttgctgccggtgccatcgagggtggccaccaggttgtcgccggccgagggcgtcgccggtgcgctgcggacttgcgcgccgagcgcctgcaggcgttcggcgagcagcgcggacaactggccgaggccttcggcctgaccggtaccgctgtccaccgcgaccagttgccggagcgtgtcgaggtaggccgggcgttcggcttcggcctggcgcagcagctcggcggctggcgtgtcggcagcgaaggcggcgggcgaaagcaggaaggcgagggcgaacggcaagaggcggggcaggcggctggcgtgcacggaaggtcctcgtctggtgggcggaggcggcgcggttgtgcgccgcggtatccgattgaccttaggtcatgagacggtttccgccagcagcgcctcgaccttgcgccgcaattcttccagcagggcccgttcctcggccgaatagtcgcgcggtcggctgtcgagtacgcagacggtgccgtacggggtgccgtcgggcgcatgaaccggatagccaaggtagttgctcaggccgaactcgacttcatcctcgttgccggcccattccgtctcctggcgcgagtcgcgcacgtgcaacggggcgtcgcggtcgaccacgcgttcgcagtagaggggtttggcgccgtcttcatggacgctcttgcggccttcggcgccgatcgggtaggtgtcctccaggcgtccggcggaggcctcgacgcgcatgtgccggggcagggaacgcatgatcagcaccgacggcacgtcgagccggcgggccagtgcgtcgatatcccggcgcagggattcgaatcgttcggaggatttcgccatgcccggcctcgcccatgtctggtggatgaaccgcgactgtagcggcgaaagggggcttggcctaaataccctttggtgcgctccccctcgctcgagcgcataagcgcccggctgtcactcctcggtcgggccgggcaggtactccagcaggtttcccggctggcacgccaggtaggcgcagatggcctccagggtagcgaggcgaatgccctttaccttgccctgcttgagcagcgacaggttctgttcggtgataccgatggcctgggccaggtccttggacctggccttgcgcagggcgagcatgacgtccagcctgatttcgatgggcatggcggacctcagacgaactggcggttttcctcggcgagcagggcggccttgcgctggatgcgtgcgatcaccatcaccgaggcggcggcgaacaggctgaccagttccgccgaaccgaagctgagactgacgatgcgttgcccctggggttggaggaaggtgacccagactgtcagcagcggttccagcaggaagttcgccagcacccagcaagccaggcacaggccgaccttgccgagcagcgccgcggcgtcttcgcagaaatactcgccgcgcccgtagtgctggaacagccttcgcagcgcctgcagtccactggccaggaccagcagcggcaggctcgacaggaggatgccgccgagggcctgccagagcggcatgtcccgcgccacaacgccgaggtcgccggcgacaccggtggcggtgagagcgaagccgaggccgtgctcgctggcgaggtcggggaagatccagcacgcggcgttgagcagcagcatgccggcgatcaacagcagggtcagggtagccatcaggcggctgtagccggccaggcggtcgcttgtcatcgggggtactcctgggaaggtgggcaggcccctcggaaacgagggaaaccggagtgatcatagtttaataataaattatcgtaaaacgataatttcttgatcgctgcatccggcctggagcgctccgcaaaatcccctccgtgcccgccgggggcacggaggggaagcgtcctacttctgcagcaactggacgttgtcgatgaacatcgactcctgctggttaccgctgaggatcatcagttcagcacgcttgatcggccccttcggcaattgcacctggccgcgcaggctggcccagcggccattctcgaccaccttgtagcccaggggcaggtattcgccgggccgaccctggctttccaggtagaggtaggcataggtcatggcctgcgagccgcgaccgtcgccgacccgtacgtccgcgctgaacgcgtaggtccggcctgcttccaggttgcccagcaggctggtgctcgcgccggtgccggcgtagcgccgctggtaggcttccagggccagccgcccggcgctggcgacgcgcgtggcgcgggcgctggcatgcacgccgctccagccgccgatgccgctctcgaagtcgtaggcgatgcgtttcggcgccggcggtacgctcggcggcgcggcctgggcttcctgcaggttcatctcgtcgaccagcaggctggcgccgctgtcgctccagaccgccacgtagaggttgcgctggtcggcggcgggacggtagtcgaaggtcttctccaggcgactgaactcgttgccgctgaccgacagttcgacgctctgcgccgggttgtaggccagggcgccatcggcgcgttcgctgagcagcgccatgcgcacggtttcacgggtattggcggccttgagcatgaccttgccgctcagccggtagccgctgccggcgcgcaggggggcaatggggcggaccagcagatcgaagccacgcacgtcgaccagcaaggcattgtcgcggcagcccttggcgacgttcaccaggctcagctgggcgttgccggaccatgcgcgccagccttccatgctggcgaactcgccatcgccgagcaggccgccgagcttggctttcgtgcaccatggcaggtccggcggggtcggcgtgtcgccgccggagcccgggttgagcgtgccgggtaccttggtcgggcgaaagtcggcgatctgcgtggccatgctgttcagcgcgcgtacggcgtcggcgtgttcttcgcggccgcagggctggttggcgcattcggcgttgaccaggcgcgggttggcgaagaacggtgcctgcttgttggtgccgaaggcatgcgggtaggccatcaccgtggcgaagcgcccctgcacgccgtagcctcggctccattcgtaggtgccgctgtgggcgtagcgcggatcgtagtagctggactccaggtcctgctcgtaggagtggcgcaggcccatgttgtggccggcttcatgggcgaaggtgttgagcccgcagtcgaccccggtgaggttgtaggcaatgtccttggcgttgccgtggaagcgcccgctgttcttatcgcccgagcccatgtagccgatgccgcaggtgatgtagccgttgccgctgttctgcgagcggttgaccaggctgaccaggtcggcgccgtactgctcgcgcaggcgctgcacctgcgggtcgcgcatgaagcgatcgaggttggcgccggtcaccgtcgggtagtcggcccagtccaggcgctgcttgtgcaccagacgcaggcgcaggttgacgccgctcttctcgtaggcggtgttggcgaactcgatgtagctggcgatccgcgcatcgatgtcgcggccatttgcggtctgggtcgccgcgggggtgtagaggaccatgatgtcgacggtcttcggcgcggcctgggcggcagaggctaccgccagggctagggtggagcagagcagggatttcttcatgggttgcctgtgttcggacaataggaagccatggcgccccgagggcaccgctggggaaacatgctgggaaggtgggctcagccctgggcgggcggcggcatcggtggcagctcggcgagcggcgcgtcgacatgatcgccatgcgggtcgctacgcgcggcgatgtcgttctcgtcgatcacccgggtcttgccgctgcggttgtcgacgatgatcgagtagctgccgtcgagggtggcgacattgatgtgggtttccaggctgccgcgcaccacggtcaggctttccgcctcgtcgccgtccaccaggccgccgcgccagaccggcaggccggcgctgttatgggtgctggcgagacgtgcctgcaagggccgctcgcgccccggcaggctcatttccagcacctggccgagcgccagcgtgtcgagcagggcgggttcgacctgcgccaggtattcgggaatgccctgggcgccttcgcggctgcgcagttcgccttgccagagcgtcacccgctcgcgtggcgcgggcgtcgtgacgggggtcggggcgagcatgcgggtagcgtccgccgccggcgccgcgagcgccgctgtcggggcggcggctgcctgggcggcgggggactggcgggcctgcggcgatgcctcgggcggagccgggtcgagcagccagccgccgatcagcgcaccgccgatggcggcggccgaggctgcgtagatccatgtcttggccacgttgtttctcctctgagtgaacgtggcgtggagtctaggaagaagcctcttccagcgtggcggcaaccgttcacatttgcgccaggccgcgcgccggcgtgacgaaactgcgaatcaggccggagcgctgcgggcgccaggtcacgtgcgctctgtgcgctgcggcaaggctggcgttcggccgccacgctgttcgcggcggaaggcttcggcgcatctggccgtctcgcgcttgaagaactggacgaagttgctcggctcgtcgaagccgatgccatcgtctacggcagccccacctatatgggcggaccggcctggcagttcaagaagttcgccgatgccacctcaaagccctggttcgtccagctggcttcgctgacgcctggcgctggctatggggtgtcgacatcccggccgacggtggcatgttcgctcatctccaggcaacccggtacggcctctagccgcgccggggcctcagcctcgcgccagttgcaggagacgggcgcgctcctgcatcagcggccggcaactgcggatgccttcgacgatgctgtagaggctttcgatctgctgctggctgaggctgttgttctgggcccagccgagcaactgcagccaggtccagcgggcgatggtctcgctctgcgtctcggccttcctgcggtcgtccccgtcgctctgtccgaccagggtctccaccagccccgaggcgcacaacggcagcagctcccggtactgctccgggtgcgtgtcgcgtaggcgacgcagggccattatggcggtggttatcgagtctgaatccaagcttttgttcacagttcactccttgtgcgtacaggctggcggctggttgatccctgggccgcgagcaactgttcgatgaaacgcgtcagctctttcttgaactcgggtgtcaggctggacaccttgaggatgagctcggccagctcgtcctcggggcaatagaggtaggccatggggacctggaggaccatggccagctgttcggaagtccgcatgttgggggagtgccgttcgcgttcgtattggttcatccgtgcgctggcggaaaactcgtccattcccaccagcatgcccaactgtttctgcgagtatcccgctctgattcttgcggcttttagccgggtacctagcatccatacaactcccgtcccgttggcccgctcgctcaaggttgggcaaatctggacaagatggaagctcaggaatccttagttttcgccgtgccggaggctctgtcgtccggggcggcgcgcggtttcgacgccgtgtacgaggctgcggcggggatatgcgtcgatgtcgccgagatcgcgcatgctccggttttctcgcggcgagccggagtatatgcgaattgcataaaggcggacgccgtttcgtcgcccgggggcggcgggtcgtcatctcgccagaggggcgggcatcggcgccgaggcggcggaaaacggcgatcgggacgatactcaggaaaggtgggcgttgcggaaccaagcctcgccttccaggactaatagccgggtttcacgcagaggtcattcccatgagaacaacaacaagcatccgccgtgtcgctgccgtcctggcagcgctgcacctgctcaccttcgccgaggttccgctcgcccaggcagcgatgatcggtactgcggaagtcatgcagcaacaacagcacaacctcgatcgccagcaactgctgaagatgctcgacgaccagggcgtccagaagaagctggaggccatgggcgtgccccgcgaccaggtggcgagtcgcatcaacagcctgaccaacgccgagctggcgcagttcaaccagcagctggaccaggcgccggcgggcggcatcatcggcatcatcgtgttgttcctggtgatcttcatcatcaccgacatgctttgcgccacggatatcttcagcttcatcaaatgcatcaatcggtgagacggctggcaggggctctgctggtctccgcaatgctcggcggctgcgcgcagccgccgagactgccgccggaaagcgcggcgctgcccgcacgggtggagctgcgcgaagtgccgttcttcccccaggaagcctaccagtgcggtcccgccgcgctggccacgatgctcggccagcgcggcctggcgttgacgccggggcaattgaaggacgaggtgttcattcccggtcgcgagggcagcctgcaattggagatggtcgccgcggcgcgccgccacggcatgctggtctatccgctgcaaggcggactggagagcgtgctcgaggaggtcgcggcgggcaacccggtgctggtgttacagaaccaggctttctcctggtggccgcgctggcacttcgcggtggtggtcggtttcgatcgggagcgccgcgaactggtgctgcgctcgggcatcacccggcgctgggttaccgacttcaccagcttcgagtcgacctggaagcgttcggggcgctgggcggtgctgaccctgccgggtgaccgcctgccggccacggcagcggcggtcccgtggctcaaggccgccagtgacagcgaggaaaccggccaccccaaggttgcccggcgcgcctacgaagaagccgtgcgacgctggcctgaggacgccttcgcctggtttgccctgggcaacagtcgctacgccgcaggcgattccgccgctgccgaacaggccatgctcaccagcgtcgagcgtcgcgtggatttcgccgcgggttggttcaacctgtcccagttgctggcggaacgcggttgcgcggcgccggcgcgccaggcgcaggcctgcgcgcgggcattgcagcctggggaagcccgcttcgctgcggccttgccgcaggccgtcgcacccgcggctcggtgcgccgagctgccggcctgtcccgttggcgcaccgccccgctgaggcggcggagccgaaggttgtcggaaccccgttccagcgagacggctctatacctgggaggaccccactcaggtgcagaacatggccaacgacaagcggacttcgccccccaccccccggcaaccggccaagggcggtgcggcgggcaagcgccaggggcatgcggcggagggcacgcgcaagccgcgtgcgcgcggcgaggagcggaaagagaaaccggccgacggacgttcggccacggcgctgaccgccaacgagcggcgggagatcgacgacaagcagccaccgcgcgccgctgtcctgcacgaggtgattcgcgtccagggcgaacacgagttgcagcgcacggtggcggcactctggtggtcggcggtggccgcggggctgaccatcggcctctcgttgatgggcatgggcctgttccgcgctgccttgcccgagcaggagtgggcgatcatcgtcagcagcttcggctatcccatgggcttcctggcagtgatcctcgcccgtcagcaactgttcaccgaaaacaccctgaccgccgtgttgccggtgatgaccgagccgaccctggaaaaggcctggcaactgttgcgtctctggagcgtggtgctgttcggcaatatcgtcggtacgctgctgttcgcctgggcggtgctgcatctgccgatattcaatgaagcggccgacgcggcgttccttgagatcggccgcgaggtgatgcacaacgacctggcgcaaatgttcgccaagggcatcgtttccggctggatgatcgccaccatggtctggctgatcccggcggcggagggcgcgaagatctggatcatcgcgatggtcacctacctgatggcgctgggcagcttcacccacatcgtggtgggctcggcggaggtaggctacctggcgttcgccggggaaatcggctggaccgagttcctgctgaagttcgccctgcctaccctgggcggcaacatcgtcggcggtagcctgatcttcgccctgatcagtcatgcgcagatccgtagcgaaggttgaggcgcggatggaaaaaacggcaccccggggtgccgttctgtcgacgcggactagaccccgagcttgtcgcgcaggctgtagtaccaggcgccgatggcggtgaacggtacgcggaacagcttgccgccggggaaggggtagtgcggcaggccggcgaaagcgtcgaagcgctcggcctggccgcgcagggcttcggccaggaccttgccggcgacgtgggtgtaggtcacgccgtggccgctgcaaccctgggaatagtagatgttgtcgccgatgcggccgacctggggcaggcgcgagagggtcagcaggaagttgccggtccaggcgaagtcgatcttcacgtccttcagttgcgggaaggtcttgagcatcttcggccggatgatcgcctcgatgtccgccggatcgcgagcgccatagatcacgccgccaccatagatcaggcgcttgtcgccggagaggcgatagtagtcgagcaggtaattgcagtcttccacgcagtagtcctgcggcagcaggctgtgggccagttcctcgttcagcggctcggtggtgatcacctgggtgccgcagggcatcgacttggccgccagttccgggaccaggccgttgaggtaggcgttaccggcgaccacgatgaacttcgccttcaccttgccttgcggggtatgcaccaccgggctggcgccgcgctcgatgcgggtcgccgggctctgctcgtagattctgccgccgagcgactccaccgccgccgcttcgccgagggcgaggttcagcggatggatgtggccgccgctcatgtcaagcatgccacctatatagttgtcggtcgccaccacctcgcggatgcgcttggcgtccatgatctccaactggttgtggccgtagcgttcccacaactgtttctgcgcgcgcaggtgatccatctgcttctcggtgaaggcggcgaacaccccgccgtccttcaggtcgcattggataccgtagcgggccacgcgctcgcggatgatgcgcccgccttcgaaggccatctcgccgagcaactgcgcttcgcgcttgccgacggtgcgctcgatcacgtcgatgtcgcggctgtagctgttgacgatctggccgccgttgcgcccggaagcgccgaagccgaccttggcggcttccagtacggtgaccttgaaaccattctccaacaggaacagggcggtggagaggccggtatagccggcaccgatcacgcagacgtcggtttcgacctcgccctggagttccgggcggggcggcgcgggattggccgacgcggcgtaataggaggaggggtagggggtgtgcggcatcttgcacctctgttttttattttttacggatgcccggatgctacccgagtcgaaatcggccggctagcctccgtgcaaaattttcaacggaccccctgaaaataaaaattccactttttcagagagttagcgaaaaaaaagcttgacggtgtttttggggtctgtagaatgcgcgccatcagcaggcacgtagctcagttggttagagcaccaccttgacatggtgggggtcgttggttcgaatccaatcgtgcctaccaaacaaatcccgcgctgctggcggggcaagaaaggcgatccgaaagggtcgccttttttcgtttgcgccccgaaaaaggccgctcggcccgtgctcgcctgggctcgcgcttcatcgcatagccgctattgacagcgggggcggtcttttccgaccctagcgccttcacggatgattcaggcgacaaggctcatgacgacctcttccggttcgcgtatcggcggacttcttcacgcttcccttttttccctgctcggactcggtctcctgctcgccggcggtttcaagaccgtcgagcggtaccatttcctgcgtactgcgcaggaagcccaggggacggtcagcgccttgaatgccggcggttcgcatccgcagatcgatttcaccagcgtttccggcgagcggatttcctatccccagggcggcttcatcttcggctaccaggtgggcgagtcggttcgcgtcctctacgaggctgggcggccggcggccagcgcgatagtcgacgatgccggcgcgctctggggaaccagcgctttcctctgcggcttcggcgcactcttcggtattgtcgggttcaggggattgctgggcctgcgttcttcccagccgacctcaaaaggacattgaagtcatgtcgcaacttcccattcccttgcccctcaacgagagtcgctggcgctacgtgacggccagtggcggaggcatgaccgtggccttcctggcgggtagcggcggctccatcacgttgctctcgccggagggtgagaacgtgtccttccgctatggcggggtgggcggcgggatcggactgggcatgcgcctgccgcgcttcggcaaggtcaacctcaatgtcaagggcaagagcgttggcggggccggtgcgctggaggcgttgccgagcaccggaaccgtcttggtcgcggacggcctggtggggcgcgacctgtcccgcggcgacttcaccgggccctgcatgtacgtcgaactcggcgcgggagtcatcgccggcggttcgggcacggcgattctcttcggcctcgatcccaagctgctggcggcggtggcgctggcgagcgcctcgccattgaccgccgcgctgggcgccagcatgtcgcggcaattactgcaatcgtttcgtggcgccctgttgatggccggggtcaacgtcggtgcacagttcggcggcggcgcggcggcttacctgggggcgttgttctgatgcaggagggcgatccgggaggatcgccctttttaccttgcgcaggcgtgcggtggccagggctccgttgagttccatggccagcggggcggtggcggaaatcgttaccggcgcggggaacggtcgtcggagattccgaaccggcgtggatcggttctttccaaacaagcccatccactcgttcgaggtgtcgtgcttgtgtccaggttgatcatgcccggagggccgttgtcgcaagaatccgatgtccggatcttctgttcacccaaggagcggctggacttctaccggcgggaaatccactacgagacgggccagctatccagtcggaccaacgcctacctgacggcgcagtcgttcctggtcatcgcctatgcctcgtcgatggccaacctgaacccggcctggggcgagctgttcaccctggtggtgccggcgctcctggcactgctcgggatcgtcaattccctgcatgcctggccgggcatccaggcatcctcggagatcatctgccactggcagttcaagcagtcctgcctgttgcacagcgatccggagatcggcctggcctacgatgattcgccattgttcagcgaacgcgaggtcaaccgcggcagcttcgagaaaaccttgctgttctcgcgacgcgtgccgttcctgttcgccggcttctggtgtgcgctgggcgtgttttcgctctggttgcaactggccggttagcgctggtggcccatcgcttcggcaaggcttggcgttggcggaggcttgccggctcgataggcgggcgccgtcggatccgggaacgcccggcgtcagggcgctgcctgctcgcagagatcgttgccgaggaggcgcgcgcccaggccgcgaagcaggtaggtctcgacatggctgccgtccgggcagtcgactcggtagccgagcgccaggccggcagagagaagaacgaacaggaacaggccgatatgttgcagtttgctcatggtgttttctacgaaagaggcttgagggcgcaggcgctgcgccgggcgattctagtgcaatgaggcagggggaggagccgatttgcatgcctaagcgttctacatggtccagggcgcccagcgattcgacagtcgccctgcgccgatcgacggcgagccggagcgaatccggctgcaactgcgtctgtacctgggttgagccgttgacgggcgctgtcgctgcctttataagaccgcctcacgcagccggcaggcagtcgaagatgagcgacgaagacgatattcacgaacccgaacacgatcacctgctggataacgattacctcgaggacgagcgtgacgaagatacgttcggcgcgctcgacgagcccgatgcctgcggaaccggcaggcgacgttcctgcgaatattgcgacgcggtccaggtgccagtcgatagcgagggtttctctatctgcgccgattgcgcagggctggaggactagccctggtcagacgctgaccacccggttgcgtccggcacgcttggcgtcgtacagcgcggcatccgcccgggcgagtgcctgttccggttcttcgccgctgccggccagggtacagccggcactgatggtcaccggcacggacgtgccggcacagtcgatcggggtcgcttccatcagttcgcggatgcgattggcgatcatggtcagttccgtggtctcgcggacccggaccatcgccacgaactcctcgccgccgaaacgcgccaggagatcttccggccgcagcgccgcgcgcagtcgcgaagccgcctcgcggaggacgctgtcgccggcccggtgccccagggtgtcgttgatacgtttgaaatggtcgatatcgctgtagatgatgccgatgcgctggtcgctggcccgcgccaactccagttcatgctggtgcagcgcgtggaagccggcccggttccacaattgggtgagggggtcgagcagtgacttgcgctgctcccggtcgatctcctggcgcaggaagcgggtgtgctcggtgaggctgcgtagctggagatatccttcggccaggatcgacagtcgattgagctggcgtccttcccggagattcagcagccgcgggctcgggtcgatcaggcagagtgtgccgatggcctggccattgctggcgtgcaggggctcgccggcgtagaagcggatgaagggcggcccggtgaccagcggattgtcgtgaaaacgcggatccctggaggcgtccgtcaccatcagcggttcgctggccaggatggcgtggccgcagaaggacaggtcgcgcggcgtctgttcggcatccaggccgatacgggccttgaaccattggcggtcgtggtcgatcagactgatcagcacggtcttcaccccgaaggtttcccgcgccagttccaccagggcgtccaggtagtgttcggcgggggtgtcgaccagcgccatgtcgtccagggcctgctggcgcagggcttcgtcgggagggagggggcaggcgagcatactggatcctgatcacggtggagactttcggtatagctgccggacaggctgaaggccagcctggcgtccgcagtcggcgcaagggtgaagagggcaaaaaaaatcccggccgcgtggagcaggccgggaaaggatccagggatgtacagcgcccacagcttatgtcggcggcggtttcgatgaagctgccggatctggtaggcgcgattttcgcgtcgatgtgtgacccgcttcgccgactatcctggcaagtggggtcgcgaaccaataggatttgcgggttttattcaatctgggtgaatgcgtgcaggaaatctactctgaagaacagatgcgcaaggcgctgggccttgccgaaacgcgaccgaaaaaggtccggaccgaggccagccagccggtccgctacaccatcgtcgaactgagcgtgcgcaagggcggggcgggattgccgctgcgtttcgaacatcgctcgcgctccatcagcaaggtcaccgcgcaactggaagcggagaaggaagccaagcgccagggttaccaggtctgggcgctgctggatatccgtcagatctgagcgaggcgcctgcgcggggcgcggcattgtcctggtctcggtccggctgctaaggtgcgcagcccatcgatacaggagtccggaacatggaactgacgatcttccaggtagacgcattcgccgacagtcccttccagggcaatccggcggcggtctgccccctcgatgcctggctggacgacgagcgcctgcaggccatcgcggaagagaacaatctttcggaaaccgcctttgtcgtcggccgcgacggcgactatcgattgcgctggttcacgccgcaggtcgaggtggacctgtgcggtcatgcgaccctggcgacggcctgggtactgatccacaagctcgacgacgcttccccggtactgcgtttcgctacccgtagcggtgagctgagcgtgcggcgcgagggcgactcgctggcgatggacttcccggccaagcgtccggagccttgcgcgacaccggacggactgctggaggcgctgggtattgccgaggcggaagtgctgaagaccgacgattacctcgtggtggtcgacgacgaaaagacgatcgccgccctggcgcctgacttcgcccggctgaagggcttgccgtgccgcggggtggcggtgaccgcgcgcagccagcgcttcgatttcgtctcgcgctggttcgggcccaacgtcggcgtcaacgaagacccggtgaccggttccgcgcatacctccctggcgccgtactgggcgcagcgcctgggcaagacccggctgagcgccgagcagggcggggcgcgcaaggggcgcctggaatgcgacgtgcgcggcgagcgggtggtcatctccggcaaggcggcgttgtacatgagcggtacgctccatctctgatcccgaagcaggagtacgacgatgccggcaccgcaggtaggcgtgggcgtcctgatcttgcgggacggcaaggtgttgctggggcgccgcaagggcagtcatggcgctggctgctggtcggcgcccggcggccatctcgagttcggcgaggcggtggaggactgcgccctgcgcgaagccctggaagagaccggcctggcgctgagcgaactgcgccacggcccgttcagcaatgacgtcttcgaggggcgccactacctcaccgcgttcatcctggccggttgcgcggaggatgccgaggcgcgcctcatggagccggacaagtgcgacggctgggcctggttcgattgggccgatctgccggagccgctgttcgcgcccctggcgagcctgcgccggcggggctattcgcccttcgacccgaagcgctgagcgacaggcaaaaaaaatcccgaccgcgggggagctggtcgggaaatacccttggggttcgcacacaccgtgagcataggccagtccgcaacggcatcaagaggagcctgttcgaactgctaggcccctttgggggccgttccactgtcgtcacctccgctcgacggcgagcgaaggggctgcccgcttgcgttgcggtatccagaacagcatcagcggcagcagcgaggcccagcccagcaggacatcgccggccagatggatgtgttcgccgggcatcaacagtccctgcaggaacatcaggccgaagtgcgcggcattggccgccacggtgaagtcgatgaacagccggtggcggaagggctggctggcggcgcgccagaggaatgcgccccagaccaggtagatcgtcgagatcatcagctcatagtgctgtccgccgccttgctggtcgccccagcgaaccaggcggagcagcaggcacccggcgtcggagtcgagcagcgactggtcgagccgcaggagcagcgtggccagggccaggccgaagaacagcaggaagccgccggccatcaggcgaatgctcagggtcagccaaggcgtggcggaaaccggggaaggggaggcagtcatgcagatcacctgtaggccatgtcgatggcgttgccttcggtcaggtcgtcaaaatccgcacggcggaaagggcgctcttcccggacgatggtgcgcacccgttcgatgtattcgcgcatggcgcggcgggtattgccctgggaggcggcggagaggaagccggccttttcgctggccatgccctccgtccagtcgcgggaagccgcctggtagatcgaacgcttgatcaggcgcaccgcttgcggtgagcgccgggacaggcgttgcgccagcgcgtcggcggcttccagtagctcctccgctggcgccagcccgttgaccaggcccagcgcaagggcctggcgcggctccagcagttgcccttccaggcacagctccagggccctggctacgcccaggctgcgcgccagcatctgggtgccgccgcctcccggtatcaggccgatgagtacttccggctggccgaggaagcgttccacctggtcgtcctcggccatcaggcgcaggtcgcaggccagcgccagctcgcagccgccacccagggccaggccgttgatcgcggcgatgaacaccttgtccatgcggcgcatgtgcgcggtgacctcatggaacaggttcatgtcggcgacgcctgccagcagggtgcgccgcagcagcttcctcgccccaggcaagtggcgcaggaggctttcgctttccagcagcaggcgtgtcagccaggccggcatggaaaaggtgatgggggcgacggcgcgctcgatctcgtcgacgtcgaagtgggtcaggaagaccccgtccgccgctccggaaaggatgacggcgccgatgtcctggcgttgctcaaggtcttccagcaggtcggccagctcctgcatcaccgccgtggtgaggaagttcgccgggggattgtcgagcaggacttgcaggaggcgtcctcgttgttctatgcgcaggtgtcgcggtgctagagtcattgcggcttcctcattggataacgagcgttatataaagatcattatccaatgtgacgacatcgtctccccaaccaacggatagtcggcatgcgctacaaaccggaacagaaacaggccacccgcgccctgctgttgagcaaggccgctccgctggtgaagcgccagggcttcgccagcaccggcctggacaccttgatgaaggcggctggtcttaccaccggggcgttctactcgcaattctccagcaaggcggagttgctcgaagcgatcctgcagcgcgagctgagcgcccagcacgatgcctttccgctggacagcctggagcaactggccggcgccacccgtctctacctcagtcgcggtcatgcgcagcatgccgacatgggctgcccgattccggcgctggccgccgaggtgggccgggcagggcccgaggtgcgggaaaccttcgaacgcgccctggaacagcggcaacggcggctggccgaactgatgggcgacgagaaccgggcctgggtgctcacctgcctgtcggtcggcgcggtgcttctcgcgcgtgcccaggcgagcgaggtggcgcgcgacaaggtcctggatgcggcgctggagcatgcgctgggcctgctttcggcgagcggagcggtttcgccgcaagcggaccgggactgattgcacaactgcaatgttcggcgtctagcgtcaggctttccctccgacaggtaagcccatgaacgcccatcatctcgaactcgccaaggccctgctggtgtttgcccttgccgtcgccggcctggtggtcggtctcatgccgatggagttctgagcgacgcaggtccgacttcgcgcttttccctcgtcttcgagtggtctctggcgttgcaccggtttaggatgcgcgggtatttcggagccgcttcgcttggcgtcgcccgccgctgcgctccgaaaccgagcattgctcgaaccagaacgagatcgaaggtgcatcgccacgagcggcgcacggcctgatgatagatggaggcaacatgagcgcggctcagccaggcattctcaccccgattccggtggtgggtcgctacctgtttttcagcatttcccaacccgagcaggtggccgcgaccttggccagcctggccgcggccaccgatggttaccagctggtggtgggtatcggccattcgctgatgctcagcctcggcaagaccgtcgagggcatgaaggactatccggtgctcgccgcgcccggcatcgacctgccgtccacgccctccgcgctgtggtgctggctgcgcggcgaggatcgcggcgaggtgacgctgcgctcgcacgcgctggaacggtcgctggcgccggccttccagcggaccggcgcggtggatgcgttcctctacggcgaggaccgcgacctgtccggctacaaggacggcaccgagaaccccaagggcgatgcggcgctcgaagccgcgctggtctccgggcgcggtgcgggcctggatggcggcagtttcgttgctgtccagcagtggctgcatgacttcgaccggatgcaggcgatccccggcgaggagatggacaacatcatcggccgccgcaagtccgacgatgaagaactggaagacgcgccggcctacgcccacgtcaagcgcaccgagcaggaaagcttcgagcccgccgcgttcctcctgcggcgcggcgcgccctggtccgacgagcaccgcgcggggctgttgttcgccgccttcggccgctcgttcgaggccttcgaggtccagtggctacggatgatcggcgtggaagacggggtgctcgatggcctgttccgtttcacccggccgatcagcggcagctacttctggtgtccgcccatggccgacggccgcctcgacctgtccgccctcggcctctgagcccgccgcggcagcaggccaggcctgctgccgcgtcctgcgcggcgctagtgggcggtggccacggcggcctcgtcgatcagcgccgctacttccttcgctcgcgaggccagtgacgcgtggctggcatcgagggtgacgatcttcctcggtgcgatccgcgcggccatccgctcctggttctccggcgcaatcatgcgatcggcgctggaaatctggtaccaggagggcttgctcttccaggccgggctgccgatggcatcgccgaaagtgctggccagcggagccttctgggtgatgcccatgaccagcccttcgtccgcagcgagatcctggcagaagctttcgtggaacctgtccgccttcacccagagatagccatcgctgtccgtcgccaggttcgctgcggccaggggcaagtgctcctgggtgatgccaccgggactttcgccgctgtcgggggcgaaggcggcgatatagaccagcccgaccacattcggctggttgccggcctcggtgatcaccgcgccgccataggagtgtccgaccagcaggaccggcccctgttgctgcgcgatcatcttgcgcgtccgctcggcatcgtccgccagcgaggtcaacggtagttcgacggcatgcaggttgtcgtggccgaggcgtttcagttcgagaatgaccttgctccagtgggcggcgccgccccagaagccgtggaccaggatgatcgcaggcaggttgctcatcgtgttgctcccttgtgggtgaggattgctggcacgagacatcgcccggcgagcatacgaggtcgcgatgggcgggcgatagcgggaggcgaggacgttcgtcgaaaagaacaactccttgttccggtaggcgacgtgatatcggcacggcggtatgttgcaagtccggacccgaccgatcgggttgtcgcgacgggcatggaggggtgatcggtcggtcgggttcgcgtcttttcggggcacccgaatctgaaaaaatcttgcttctcgccataccgggggagcggggcgggtagattttcttccgaatccttcactttctacccggtcatggaaaaagctctgaaattggcgtcatgcctctacggcctgctgatcctgctcagcctggcgatggtcgccttcctcagccagtttccgtttctcctcagctcgggagcggaaaacctctcgatgtcgatcctgccgctgctgatcccgctgatggtcgggctggtcgtctgcgaggcggtgcgggcggtggtgccgaagaagcgctaggcgcggggccgggatcagcggccgagaatgcgctggcggcgcagccggtactgctcgtagggaaggccctggcggttcagctcttccagctggcgttcgctggcgctgcgggaaaacgattcctcgactatcgagtccggcgtgacaggctgtgcgcaggcgctgaccagcagcacgcccaggaccagggcaatgcgtggcatgcgatctccatggactacggcagaagggaaaaaaaggccattaccaagcggggggagggttggtaatggcctgtacaagggacatttgccaggccttggggatctggcgaaaaagacgatatcaagggggaatttgattagccagctaacaaagtggaatgaagttttgcggcaggcgtaacaattctgtccgaatcgtcattcttgcgtcaccgccgggacagagcggtttcggcagactgcgggggagtcgccgaaggagattcgtcgtggacgatacgctcagattcgcctcgcgcttgtgcaagttcatcgtcgccgccagcttcctgctcgtggcggtcgccagcctttgcctgtggtggacgggccaggcctacgaatacgcggcgctggcattctttccgttcgccgtacccatgctgctgctgatcatggtctgcgacctgctggcagcgctgaatggcaggcgtcgctgagcgcacgggctgcctagcgctttcagctaggcggatgtcgaacccagacaaccggcgccccgcgcgtggccctatggtgaggcattcatccactgccttcctggggcgaccatgtcagatttcatcaccgtactgcgcgatacctgtcccgtacccgtgctggacgccaccaagtggaagcggatcgacggcgatccgcataccgtcaacctcaacgcatacgcctcggcggacggcagcaagctgatgggcacctggatctgcacgccgggcaagtgggaggtgaactacgaacgctgggagttctgccacttcctcgacggctactgcatcatcaccccggaaggcgagcaaccggtgcacctgagggcgggcgacgtgttcgtcatcgagccgggcctgcgtggtacctgggaggtagtggagacggtgcgcaagtacttcgtcttcgcctgacggtattgccgcacgtccgggatgcctgccggacgtcgcgcctcagtcctggtggacgatgcggcggatggtgccgccgcaggactggtagcaactgcggtactcgtcctggcagtcgtcgccgaaatcgaagttgcgctgcgggtaggggcaggacttgcgcttcttcttgtcgctgttctgcatgcagtagttgtaggccgtgctctgcgcctggtagagcgcctcgtcctggcgctgctgcagcttggcgagggtcttgcactggcgcttctcggcattgcactggctcacgcagtgcaggccggcatcgctggtcggcggaatgtaggagtagctgacgctagggccgcaaccgccgagcagcagggcaagaccgaggagggggagcagaaggtgtttccggaacggcattgtcgatatcgataagcaatggcaagcgagagcgaatgctatcactggctttccgaagctgtacggctctacccgataaggttgaactggcgcacgaaacgcaaaaaagaaaaccccgggactggcccggggttctcgtcgcgctcgcaggttcgatcagaacacgctgaacgggtactcgacgaaggcacggatttcgttgccgtcgtcgttgtacgagcgggcgtcgttggagacacgcaggaacgagctgcgcagacgcagggtgaggtccttggccggaccgctctgcaccacgtactggacctggttgaagatctcgcgctccttgccgttgctggtctcggcggtcttgatgttgtcgccgcgcacgtaggctacgcggtaggtcaggccgggcacgccgtacttggcgaagtccagggcgtagctgacctgccaggaacgctcgtcctcggcgttgaagtccgaccagtaggagttggccagccagatggtggtgccgccgtcgccgatgccgccggcgttctggtaccagccgtagttgtagccggtgtcgccggtgttgcgctggtgggcgatcatgaaggtgtgggcgtcgatggtgtaggacgccgccaggctccagatcttgttgtcgcggttaccgttgaagttctggtcggcgaagtcgctgtccagcttggtgcgatagccgttgaagtcgaagttcagcgactggtcggcctgcagcgggatggtgtagttcaggttgatgtactgcttcttcagtacgtcctcgacgtcggaagcgtacagcgaggcgttgaagtgatcggtgaaggcgtacttgccgccgaacacgttgatgctcttcaggccgccgctgtcgcgcccttcggcgctcttgcgggattccgcggtgaagcgaccggcgttcagctccaggccctcgatctccttggaggtgatcagggtgccgctgtagctttccgggagcaggcgcgagttgtcgtagctgagcaccggcaggctgggcatctggtcgccgtacttgagcacggtgttggagatgcggaacttcaccgccgcgccgcccttggacagatcgtccgccgcggagccgctgtcgccctgcttgaagaagtcgataccggcggcgccgctacgacccttgccgccgtccaggcgtaccgcgtacaggccgaacgcgtcgacaccgacgcccaccgtcccctgggtgaagccggaggtgaaggtggcagtggcggcctggccccattcggccttgtcctgccggccatgtttgtagtcacggctgatgtagccattgcggaagaacagatcgaggtggctgtcctcgacaaacccctttgctgcttcttggtcattggccatcgcctggcttgcagtcgcgatgcccagtgccagcaggcaaatccttttcttcaacatcttattgttcctggttgttggcttgatgtgcgctgaaattgaaggaagcgcaaggttcgaagtgcacgggagtcatttgtcccatttaccgtgcgtggcggttctggtttcttgtttctcccgttggcggcgcaacaataccagaacattgttcgatccaagaaagcttcgagtcatttgctaataaccaaagtgcaaggaaagccccttccataggctctgaatcgggcgttgccggatcgcttcgtcatgcgcctgcaatatcaaccttatcgataagtaccatgccgcgaagtcgctgcagttctcgctttgggcggtgataccgtcgaatcgtgaacggatcgacaaagagggacgtgacatgaagattcttatcgctgtattcgccgccctggccctgtccgcctgtgcctcgcctcccgcttcgaacgccccggcgctggccgccagcaccagcaaggctccctacgattacgcgatgtgcgtcttgcccaagtggcaacgccaggcgccgggcgtggcgctggtggaggaaggccgcggctatcgcctggcggacgccggtcagtggctggaggtgcagccggcggggggtggcaacctggtgcgaatccatgatcagcagccctgggtcacccgcggggccttcatcgatgcggccaggacctgttcctgagccgcgaggaagagggaagagctccggcccccctagcatgaagtgtccggagctctacggccgcaaacggaggatggccgcagaacgatcatctgcctatggccggcgctgcgcttgatcgagatcaagtactggaggccggggagccggcgtgtgcggcgattcgcgtgacgggtctcgttttttctgtgaagtgcattgcataacgcttcaatcgggacgggtggccagcatgccaaccagttcctgggcggccttgcgcaatggctggtttttcagccagatagcgtggacaggcagtttcagctcgttcttggtattcctgaagtccaggcgtaccagccttcccgttgccagcagcggcgcgacccgggacaacgggaaattgccccagccgatccccgcctcgaccatttccagcgccgtgcccaggctgtcggtgcgccagcaggcgccggcaatcagcggacgggtgtcggccaacggcaggtcgcaactggccaccaggatctgccgcacgttcaccagctcttccaggtacagcgcctgccccggcttctgcagggcgggatggcgcggcgagatggtcgcgaccagcgattccgcgccgacatactggaagcgctcctgcgggttcacgctgatgccggcgaatccgaagcacaggctgatgcggcccccatggagcagggcgagggcatcgtcctgcgccgcgctgagcacctcgacatcgagcagcgggtagcgctcggaaagggtgcggagggcgccgaacagccgcccgctgtcgatgtccgcaaccacgccgagcgacaggcggctttccaatccctgggagagttccagcgcatgcacctgcaactgggcgagctgctcggcgatcatccgcgcttgcggtgccagggccctggccagcgccgtaggacgggcttcgcggtgggttcgctcgaaaagggcgaaacccagctccgcctccaggttggcgatgcccatgctcaccgccgaaggcactcgacccaaggcacgggcggcgccggaaaaggagccgcggtcgaggacggcgaggaacagctcgatggtatcgctggaaaagttcatggcaattctcctatcagcagatctgaaagctgctgactttttctgtcaagaaaattgatccaaccttgcccgcctttccgctatcacgcccgagaggtccacgtgcaaggcatcaagcgcaaattggtctacgtgaccgcctacgaattgatcgggatgagtatctcgaccctggggctggccctgctcgccggttccacgcccactaccaccggccccctggcggtggtgatcaccaccgtcgcggtgacctggaacttcatctacaactgcctgttcgagttctgggagcggcgccaggccgtgcgcggacgcagcattgcgcggcgggtggcgcacgccatcggcttccagcagaccctggtggtctacctgatcccgctgatcgcctggtggatggggatttccctgctggaggcgttctggctggacctggcgcttatcgtcctgatcccgtgctacaccttcctcttcaactgggccttcgatcgcctgttcggcctcccgacttccgcgttgccggccggcgaggcggcctccgtctgaggattttttttcttcagcgccattcgcgctcgccttggccggggcaaatcgcctaccttagacggacgtgcgctgtggtgccggttcagggaggaagtacgaccgcaagccatgaaggtctgccccggcgaggatggggtgcggcatttcgatgaacggattggggtcactatgcggattttggggatgctactgggggccgtcttgctggcgggttgttcgacatcgacgccctcgctcgacgagacggaccaggtaccgaaggagcgtttgtacaactaccagttccgtgacgacggcgacgccttcctggtggtttcccgggaccgcgagttcctcggcagcgtctgcaatacccgcttgatcatcgatagccgcctggccgccgagatccaggccggcgagagcgcgcgtttccgtcttccggcggggctgcgggtggtatccgtgcagggcgatgggatctgccgcggcgaggcgcccaagcaggtggtgcatgtgcagaacgggcagaccacgcattaccggatcaccgtggactccggcctgaacatcggcctggtgccgggctgacgccggcgcaacgaaaaaagccgcccgtgggcggctttttcatgcgcggcgtttattcgctgaccgctttctcgaccttttcggacgccgaccagatccgatagcggacctccacgtccttcggcgcatagaccacgatcggcagcttgctgttgtagcgcagcaggaagccttcgccgaccaccgggatgaagcgctgctccttcttctggccggggcaggccatcatcgtgctcatcggcccgctgaccttgtccaggcggtagtaggagtagccccagccttccagggtatgttcttccagctcgccgcccagacgctgctggttgcagtcggcctcgagggtcttgccggcgatgatctcgaccttgaatgcgtcttccgcgtcctgtttcggcaggtggatgacctggcgggtgaagccggcatctgccttcgggtagggaaccttttcatccagtttggcggccatggcggtgctggaaagagcggcaacgccggcggcgatcagtagtgctttcatgtccttgaggttctccttacgtggtaacgcgagcagggtaagacaccgaggcacgggtgaaaagttcagtggggacgtaacggaatgttccatgtcctgggccagccggtcggggcacggccgaatcgcaggcaaaaaaaagaccatctgcggggggagggcgatggtcttcaaaggagcgtcggggacttggggttctcccgacgccgctacgatctcacgccgctccgctggggaaaaatgctttggactgatagtggctatcgatgccggtgacttgaaattccccgccaactcatagcaagttccgcacgatagagccgtcagcgcatcagtttgcgttttttcagcgggtcagttgcaaggccagttcatcgacctgttcggcccagtcggagtcctcggccagggcctcgcgcaggaagctggcctgggcagggttccagaatggcgcatcgggcagcgccgtgccctcctcgaggtggtgccgggcgagaaaggcgacgatgtcgtctcgcccagcggggagccccaactggcggaacaggttggaaaaggtgtgcgggctggtgtccatgacggttcctcctggattcgctgtttttccactatagccggcgggacggcagggccgccgtgggagccgggggtgggtaattttgtcgcagatgaaaaagactgttgtgcgcggcgtgcttcatggcgaaggggcgggcgcttattattagcaagctaatgataaccggagtcagcctatgtccagaatcgaagtcgccgtgctggtggggacgtccgttcccgaatcgctgcgcagcaagggattgctggcctgttggatcctgatggtggacggcgccatgtgggccggccccttcaccagccgtgacgaggcggaagccttgaagggaacctgggaactgagttggccgctggaggcggcgatctccgcctgagccaaggcccttgccttgccgaaaagcccgccgagcgcgggctttctgttgcctgcggaaacgccctagcggcggcccaccagcaggccgaggaggaagccggcgccggccgatacggcgatggtctgccagggatggtcctcgacgtattcctcggtcgcttcggcggccgcctggctgcgttgcaccacgccgcggcgggtgcgctcgatggcgtcgcgaccacgatgcagcacggaattgatctgttcacgcaggttcgcgccctccttgccggccaggctgccggtgccgctcatcaactggtccacctcggcgatcaggtcctgcagttcggccatggcctggtcctggatagcctgcttggcgcgagcggagcgggttttcagagtcatgtcggtctccttgacgaggatggttacctaggtatggagtcgcccgcttcgctgaaagttgcacggcatggcctgcgtcgggggtttccgtagcatgcgggagagccgtttcaggatgccccggcctcgccgcgcaggtagcggtcgaggtcgatcgcttcgccgctcttgagtttcaggcgtcggcgcaggtcgtcgaacatagcgtcgtactcgcggcgctggcgcacgatcggtccctgccgcaagcgcaggccgtggcgtcgggccaggcgactggcacggctggcgaaatgcacggcggcgtcgcgtggcagttcgaagctttcgctgaaaggctggccgtcgatccggccctccatgtcgaagtgtacggccaccgggcgggcctcggcctccaggacccggtagcgcaggtggatatcgaatgcctggcggtcgacttcgctggccgaggcgagatgcagatggccgggaatgaacatggcctgcctccttttcggataaccggggaaatgcccttgcctgccagggtatgcttcgccggcctcgggacgactgtcccaggtcagttttttccggattggagcggggatgcgaatggcgctgggagcgttcgggtgttgactgactgggccgcgtacgccgggctgttcctctcggcgttcggttcggcgaccctgctgccgttgcagtcggaaaccgtgctggccgccttgctgctgcgcggcggccagtcggtcgcgtggctgctggcgctggccatcgtcggcaatgtgctgggttcctgggtcaactggtggctgggtcgctacctcgagcatttccgcggtcgccgctggtttcccgtgggcgaggtgcagttgctcagggcgcagcgacactatcgccgctacggccgctggaccctgctgctcagttgggtgccggtcatcggcgatccgctgacgctggtggccggcatcatgcgtgagccctgctggagtttcctgctgatcgtcggcctggccaagacgctccgctacctggccctggctgcgctggtgctgggctgggccggctgagcgcttcgtcggcgagcgtagaactatttttcgcggggcaatgtccattgctgcgaggtgtaactgccgcctcatcgcccccggggcctttagttgccgctgtggtcccgggggcttctcttttcctgcctgtttccggcgatgcgaggtgcgcaatgtcgagggtggttgcgggatcgctggtctgcctgctgctcggttcggcgccggcctgggcttccacggccgaggcgtggcaggcgcacgacgccatggtgcgtgccgcctgcctgaaagccagcggcttgcgccaggtacgcgcggtggggcaggtactgcccttcgacgatgaggtgggctattcggcgctgctcctgcagggccgctatccgcagccgcacatgcagggccgccagggccgcgagctgtgtctgtaccggcgcgccaccggcaaggccagcgtcagcgaggccgacgccctgctcaagccttgagttcggggtcgtcgttgtccggaagttcgcgctcgccagggtccttgccgtcttccgaatggtgttcgatcaccgcgttcaactcggcgccgaacagcaccactgccgccgacaggtagaagtacagcaggaggatgatgatcgccccgatgctgccgtacatggcgttgtagttggcgaagttcttcacgtagaagccataggcgagggacgcggcgatccaggcgatcaccgagagcaccgagcctggagtgatgaagcggaaacgctgctcgacatccggcaccaggtagtagaacagcgccaccgcgagcatcagcaggaacaccgcaagaggccagcgcagccaggtccagagcgtcaccaggtactgttccagaccgaccaggccggcgatccaggcgatcacctgcggcccggtgaccatcaggccggccgccaccagcaacaacagggcgatgccgagggtgtagaggatcgacagggagaagcgcttccataccgggcggctctccttcacgtcgtaggcggcgttgagcgcgatcatcatcgagcggatgcccgccgaggaggtccacagcgccaccgcgataccgatcgacagcaggccgcctttctgctgctgcaactggtcgatcaccgggttgacctgatccatcgcctcgggcggcagcagcaacgccgcctgctcgcgcagccaggcgaagaactccggtaggtgcaagtagcctacgagggtgatcagcaccagcaggaacggaaatagcgagaacagcatctgataggcgagggccgaggcgtaggtcggcatgtcgtcctcgaggaactcgttcacggtgcgcttgaccaggccgaacaggcctatttcccgataagccgtacggaacattccatctccttgctgtgtgcgtgccgatgacgatcgaccaccgatggccgcttgccgccaggcattttccgttgggtgaaattcgtcgcgtcctttctgggacgccacggcgggcgaattggttcgtcgccggcgtcatcattcggtcgcatccgttagccagactgcgcctgcccgccgcgcggcgggcctccgtccaacttctcagaaatggagcgcaccatgtctgtcgacctgaagaaaatcgccgctgcctttcccgagttccagttgtccagcaagagccgccacgacggcgcgctgttgttgcagttgcaggccgccgacggccgctacgtggctcgcaccataccctcgccgcagctcagcgcgccgccggagaccgagtggctgatccgcagcatccgccgggaactggccgtgccgggcatggaaatggcgatggcggcacgctgagttttttcgccgcgggaaccgatgatgcgataattccgcctttccacacagctgacgggaaggcaatgaagcgcgagaaggttcgggacaggcaggcggcagggaagatctcggcgacccacatcatcgccaatcccaccctggccagggaatggatcgtgttcttcaagaaggacggcgggcgcagctatttcctggtcgacgagagcgacgaggtgatgtcgttccgccggctcgacgacgcggtcaaggagctgcgcgggctgggcatcaagttcgcggagatccatctctaggagcggcgtcgcgcggtcgccactggccagccttgcgcgcccgcgcttcttcctcggcgaaccggtactggccgcgcgcctcggccgtctggccgctgtccggcgcgtcgcgccagctggccaggccaatggtcagcagggccagcccggcatccagggtatgtccgcaggtggggcagtcggccggggtgacccaggccgcgccgaggatgcggaagcgcgcgtcgcggccttgctcgcggatggtcgtcgatttgccgagcagcatgtcttccagggcttcccgggcgcgccgacgccagggctcggcggccggtagctcgacggcattgagctggatgcgcagcgccttgttcgcgccgggcaggcggcagcccaggctggcgtcgtcgtgtatcgccaccaccgtgcagtcgaagcggcgctccccggcgtcggcggcgaacgccagggcggcgcagagcggcaacagggcgagggtgcggaatatcatgggctactccggcggaggtcagcgtcgacgcgaggataggttgctgcaggtcgccaggtccaccgggccgacatagggattgccccagcccatcacgcagccgaccatgtggttgcgctggcgctcccaggtctgtggcgggtactgcttgtgccaggcgttgtagagctggcgatcctgcttcgacaggcgcaggccgtagcggtcgctcatgtagaagtaggtgcgggcgatcatcccgcgaatctgcgggcgtggcatcgccttgcgcgccttgaagtccaccaccatcgggcaggcgccgtattgctggggtttctgcggcagccagccgaagccgaagttgctgcggtcgccgttgacctcgccgatgctcggcaccaggttgtgcaggtcggcctcggcgcgctggtaggtgctgtcgtgcctcgcgcagttgctccgcccgccgttctgccagcagcgtcgctggtgaccgatcacccaggctgggacgatgtgttcccactcgatgcgccgcgcgcggttggcgttcttcctcggcttgtagccgcaactggcgaggtcgacacgatttcccgagtagcgacagccgcagtagaactccacggattgccgggcgtagagcttccagccgattttcttcgcttcggagaacgtgcgcggggcgttggcctggccggcgctggcgaggaggagggcgaaaaggcctacaaacaaacgggaaagcatgcggcaacttccaaaaaaatccgcatgttactgattttgcaggagatgccaatcgtggccagtccatggccaggcgaggggcggaccttcccgtttgcgccgcgtccatgcgatggttagtatgcgttccgtatatgttttgtagtcgaggtgtagtgtgggcctggtgaagatttccgagcaattgcacgaagaggcgcgcatcgcctgcaaggccatgtcgcgctcgatcaatgcccaggccgagcactggatgcgcatcggcatgctgatcgaagccaatcccggcctgacctatgcgcaggtgctacgccaattgatggacgaagcgcgcgaaagcgaccgccgcgagcaggacgcggcgaggatctcgggatgatcaagagcgcggaggaaatccagcgcatgagcgtggccggcgcgctcaccgcgaaagtcctcgaagtcctcgacgaggtggtgcggccaggcatcagcacggcagagatcgaccgcttctgcgagcgctacatcgtcgacaccctcgcggcgattcccggcagcaaggggcagtacggctatccgttcacggtgaacacctcggtcaacgaggtggtctgccatggctggccgtcggcgcagcagatcctccgcgacggcgatatcgtcaacgtcgacgtcacggtgatcaaggacggctatttcggcgacagcagcaagatgtaccgggtcggcgccatcgaccgccaggcgcagaagctgctcgacgtcacccgcgaatgcctgtaccgggcgatccgcgtggtgcgcccggacgccaccctcggcgatatcgggcatgccatccagagtcacgccgaagccaacggttattcggtggtccgcgaatactgcgggcacggcatcggccgcaagatgcacgaggcgccgcaggtcctgcacttcggtcgcgctggcgcgggtgcgcggctgaaggccgggatgaccttcaccatcgaaccgatgatcaaccagggcggccacgcggtgaagctgcacaaggacggctggaccgtgaccacccgcgaccgccgcctgtcggcccagtacgagcacaccgtgctggtcaccgagcggggttgccgggtcctgaccctgcgcgacgaggagcgcgaggcgctggccgacctggctggctgatcgacgcccggcctggttacactgcgacgacttttccgaagggaggctggcgggtgtccggcaggcgttttggcgagttcgaactgcgcgccacttggttgcgcgaggacagcggctatctggccgagatcgagataaccagcatcgacgacggacgcaccgaatggctggtgctgccgggccagccgccgtgcgagagtccggcggccgcgctgtcgctggcggaagcggcgctgtaccgggtgcgcggcttcgatgcgcggggccggccactgttttccgactgagcctgctggcaaatcgcatgatgcatttcgcacgatcttgcagtttgcacggaccgcttcgctgagtattttcgtaagttattgattttaaattgttttaattttccatgtggctggcatgaaagctgccacctttccccgtgttgcggctgcgctgaagttcgcggtcggttttcatgcaagaggggataaacgatcatggaaaagtccatcaagatgctgttcgatgccttccaggccacctttgccgtatccacccagatgcgtccggacggcggcgccctcctgaccctgcgcaacggcgaagagatcgtgacccgtcgcgtggtgtccgccgcccagttggccgacgagaagcgcatgtactggttcatcaacgccgtgcgccgtgacctggccctggaggcggggagcctgccggtggatgtggtcggcaccctgcgtcgtctgcaggagcgcggtctgccgagctacatggcgggctgaacggttcgtccggaatcctggcggagacctccggcagggcgggcgagagtgctagagtgaagcttcgagggggctgggcgaggatcgaccggccccgctcgtgtcggaagggaaggccagggctggcctgcccgttcggcgcttcggcaggctggcgcagaacgatgcaaggtcgttcgggtcagcatcagggatgaaatgactgacaggagtcgggatgctgcgttacgtcgtgggttttctcgcgttcaccgtgctggcggcctatctgttgctgggggtttcccagcacgccttcctgccgtgaccggtcggcatggcggcttcagctgcgttgcggaagaggctgtggcggccgtgcgggatgccggttttcggcttgccgtgccttgcgttgcaggcgtgcgcgccgacgcggcacgcgcaggaaggcccacagggtgacgccggcgaggcccagccaggcgacgatcagcaatgtgacgaaggattcgggagtcatggttcgtcctcctcttacccaaggatagaccctgcgggaaggggaattactgcaatcggtcttcgaccatggtctgaaacgcggtcactcggggccggcgccgaccagggccaggcagccggtgaggctggtcagcaggggcagggcgagcaggaaagccagccagatggcctccatgcgcaacagcgtggcgccgaggaacagcgcgaccaggaggatggtcatgagcagggcggtccagccgaagtacatggcgaagttgtcgatgcccaggccgatgccccagcccagcagcagggcccataccccggccagagccaggccgagggccagcatgctcgccagggtccgggcggacggggcatgcagcgggtggttgcggaatagctcgtagaagatcggcgtattcatcggcgtcacctccgcaggggaacttccagcctagtccagcgggcgagacggccctagacctatttgtcattacgaggcgtgacctcaggccgttaacatccatcttttccaggcgatgccgtgcatcgggctgcgggcccgctcaccgttcgtcgcgctgagtcgaaaaagaaaccgaaagggttgcgtgcatgagtggcgaactcgcctcgttcgaggtggatgggtatcaactggtctatcaggacctgggtgaaggcacgccggtgctactggtccacggttcgctgtgcgactaccgctactggcaatggcagttgcgcagcctcggcaagcaccaccggctgatcgtgccgagcctgcgtcactactaccccgagcgctgggacgggcagggtgcggacttcaccagcgcccgccacgtcgccgacctgctggcgctggtcgagcggctcggcgagccggtacacctgctcggccattcccgtggcggcaacctggcgttgcgcctggcgctggccgctccggacgccctgcgttcgctgagcctggccgatcccggcggcgactatgccgccgaggtctacgcccacgccggcctgcctgcgcccgaggaaccattggaacgcaaccagttccggcgccaggcgctcgaattgatccgtggcggcgaggcggaacggggactggaactgttcgtcgatacggtgagcggcgccggggtatggaaacgctcgtcggcgacgttccgccgaatgacgctggacaacgccatgaccctggtcgggcaggtggccgaccagccgccggcgctggcgctgtcggaactgcgctcgatcgacctgccgagcctgatcctcaatggcgaacgcagcccgctgccattcccggccaccgccgaggcgctggcggcggccctgccgcgcgccgagctgcaacgcatccagggcgcgtcccatggcctcaatgccacccgtccggcggctttcaaccggtcggtgctggagttcctggcgcgcgtcgatggcgttgcgccggacgtggaaacgtcctgaagcgaggccgggcgaactgaccgctcgtcagctcgccgcggatgctttaccatgggcgcttcgcgccggatcagctccggcgtttttcgtcagtatccattcccagtgatctccgtccgcgcgcttcggcgcaggggtgccgcaaggcgcctgccactgtgaggcaggccggcccggcgggcgacgcttactggcacatcccaacccacgtggcctttggtaggggtcaccactaggagaggaggcgccatgcccatcattactcttcccgacggcagtcaacgttccttcgatcacccggtctccgtggccgaggtggcccaatccatcggcgcaggcctggccaaggcgaccctcgccggcaaggtcgacggccgcctggtcgacgcctgcgacaccatcgatcgcgacgcgaccctgcagatcatcacgcccaaggacgaggaaggactggagatcatccgccactcctgcgcccacctggtcggccatgcggtcaagcagctctatccgaccgcgaagatggtcatcggcccggtgatcgaggaaggcttctactacgacatcttcttcgagcgccccttcacccccgaggacatggcggcgatccagcagcgcatgcgcgagctgatcgacaaggactacgacgtgatcaagaagatgaccccgcgcgccgaggtcatcgagctgttcaagtcccgtggcgaagactacaagctgcgcctgatcgacgacatgccggacgagaaggccatgggcctgtacttccatgaggagtacgtggacatgtgccgcggcccgcacgtgccgaacactcgcttcctcaaggcgttccagctgaccaagatttccggcgcctactggcgcggcgactcgaagaacgagcagttgcaacgcatctacggcaccgcctgggccgacaagaagcaactggcggcctacatccagcgcatcgaagaggccgagaagcgcgaccatcgccgcatcggcaagcagctcgacctgttccacctgcaggaagaagcgccgggcatggtgttctggcacccgaatggctggagcgtctaccaggtgctcgagcagtacatgcgcaaggtccagcgcgaccatggctatgtcgaagtgcgtaccccgcaggtggtcgaccgcatcctctgggagcgttcgggccactggtcgaactacgccgagaacatgttcaccacctcctcggaaagccgcgactacgcggtcaagccgatgaactgcccgtgccacgtgcagatcttcaaccagggcctgaagtcctaccgcgacctgccgctgcgcctcgccgagttcggcgcctgccaccgcaacgagccgtccggcgcgctgcacgggatcatgcgcgtacgcggctttacccaggacgacgcgcatatcttctgcaccgaagagcaggtgaagaaggaagcggccgatttcatcaagctgaccttgcaggtctaccgcgacttcggtttcaccgacatcgccatgaagctgtcgacccgtccggccaagcgcgtcggttccgacgagctgtgggatcgcgccgaaggcgcgctggccgatgcgctgaacgaatccggcctggcctgggaataccagccgggcgagggcgcgttctacgggccgaagatcgagttcaccctgaaggactgcctcggccgtaactggcagtgcggcaccctgcagtacgacccgaacctgccggagcgcctggacgccagctacatcgccgaggacaacaaccgcaagcgcccggtgatgctgcaccgtgcgatcctcgggtccttcgagcgcttcatcggcatgctcatcgagcactacgccggagccttcccggcctggctggcgccgacccaggcagtggtgatgaacatcaccgacaagcaggccgatttcgccgccgaggtggtgcggatcctcggggaaagcggattccgtgccaagtccgacttgagaaacgagaagatcggctttaaaatccgcgagcatactttgctcaaggttccctatctcttggttattggagatcgggaagttgaatcgaaggccgtcgcggtgcgtacgcgcgaaggggaagacctgggctccatgcccgtcacccagttcgctgagctgttggcacaggcggtttcccggcgtggtcgccaagactcggagtaatcattattaagcgtgaaatgagacaggataagcgagctcaaccgaaacccccgatcaacgagaacatctcggctcgtgaggtacggttgattggagctgatggccagcaggttggtgttgtttcgatcgatgaggcgatccgcctagccgaagaggcgaagctggacctggttgagatttcggccgacgcggtgcctcctgtctgccgcatcatggactacggcaagcacctgttcgagaagaagaagcaggctgcggtcgccaagaagaaccagaagcaggcgcaggtcaaagaaatcaagtttcgtccagggacggaagaaggggattaccaggtaaaactacgcaacctggtacgtttccttagtgaaggggacaaggccaaggtatccctgcgattccgcggccgtgagatggctcaccaggagctggggatggagctgttgaagcgggtcgaagccgacctcgtggagtacggcaccgtcgagcagcatcctaagctggaaggacgccagctgatgatggtcatcgctcccaagaagaaaaagtaaccaccagggcactggcaggccttgcggttatgcgtaatcactcaatgcggagtatccgaacatgccaaagatgaagaccaaaagtggcgcggccaagcgcttcaagaagactgctggtggcctcaagcacaagcacgccttcaagagccacatcctgaccaagatgaccaccaagcgtaagcgtcaactgcgcggcacctcgatgctgaacaagtctgacgttgcgcgcgtagaacgctccctgcgtctgcgctgattattaaggtagaggattaattcatggctcgtgttaagcgtggcgttatcgcccgtcgtcgtcacaagaaaattctgaagctcgccaagggctactacggtgcacgctcgcgcgtgttccgcgttgccaagcaggcggtgatcaaggctggccaatacgcctaccgtgaccgtcgtcagcgcaagcgtcagttccgcgcactgtggatcgcccgtatcaacgctggtgctcgtcagaacggtctgtcctacagccgcctgatcgccggcctgaaaaaggcggccatcgagatcgaccgtaaggtcctggccgatctggcagtgaacgaaaaagcggcgtttaccgcgattgtcgagaaagcgaaggcaagcttggcttaagccctacgacaatcaccggacttcggtccggacgtaacgtcaccgataggggaagaggccttaccgctcttcccctattttgtatctggagtccatacatggaaaacctggatgcgctggtctctcaagcattggaggctgtgcgacacaccgaagacgtcaatgccctggagcagatccgggttcactacctcggcaagaaaggcgaactgacccaggtgatgaagaccctgggcgacctgccggccgaagagcggccgaaggtcggcgcgctgatcaacgtggccaaggaaaaggtccaggatgcgctgaacgcgcgtaagaccgagctggaaggggccgcgctggccgcccggctggccgcggagcgcatcgatgtcaccctgcctggccgtggccagctgagcggcggcctgcatccggtcacccgcacgctggagcgcatcgagcagtgcttcagccgcatcggctacgaagtcgccgaaggcccggaagttgaagacgactaccacaacttcgaagcgctcaatattccgggccaccacccggcgcgtgccatgcacgatactttctatttcaatgcgaacatgctgctgcgtacccacacctcaccggtgcaggtgcggaccatggagtcccagcagccgccgatccgcattgtctgcccggggcgcgtctaccgctgcgactccgacctgacccactcgccgatgttccaccaggtggaaggcctgctggtggacgagggcgtcagcttcgccgacctcaagggcaccatcgaggaattcctccgcgccttcttcgagaagcagctcgaagtgcgcttccgtccgtccttcttccccttcaccgagccctcggccgaagtggacatccagtgcgtgatctgcagcggcaacggctgccgcgtgtgcaagcagaccggctggctggaagtcatgggttgcggcatggtgcacccgaacgtgctgcgcatgtccaacattgatcccgagaaattccagggcttcgccttcggcatgggcgccgagcgcctggccatgctgcgctacggggtgaacgacctgcgtctgttcttcgataacgatctgcgcttcctcggacaattccgctaggccagaacgcaaccggattccttaggagaacaggatgaaattcagtgaaaagtggctgcggagctgggcaaatccgcaggtttcccatgacgagctggtcgctcgcctgtccatggtcggcctcgaggtcgacgccgacctgccggtcgccggcgccttcagcggcgtggtggtcggcgaggtgctctcgaccgaacagcatccggacgccgacaagctgcgcgtctgccaggtcagcaacggcagcgagaccttccaggtcgtctgcggcgcgcccaacgtgcgcgcgggcctgaagattcccttcgccatgatcggcgccgaactgccgggcgacttcaagatcaagaaagccaagctgcgtggcgtcgagtccttcggcatgctctgctcggccaaggaattgcagatcagcgaagagaacgccggtctgctcgagctgccggccgacgcgccggtcggccaggacgtccgcacctacctggagctggacgactacaccatcgaggtcggcctgaccccgaaccgcggtgactgcctgtcgctcgccggcctggcccgcgaagtcagcgccatctacgacgtaccgctggcgccggtggcggtggacgcggtcgccgcgcagcacgacgagacccgtccggtcgagctcgccgcgccggctgcctgcccgcgctacctcggccgggtgatccgcaacgtcgacctgagccggccgaccccgttgtggatggtcgagcgcctgcgccgttccgacattcgcagtatcgatccggtggtcgacgtcaccaactacgtgatgatcgaactgggccagccgatgcatgccttcgaccttgccgagatcaacggcggcgtgcgcgtgcgcatggccgaggacggcgagaagctggtcctgctcgacggccaggaaatcaccctgcgcgccgacaccctggtgatcgccgaccaccagcgcgccctggccatcgccggggtgatgggcggcgagcacagcggcgtcagcgacagcactcgcgacctgttcctcgaagccgcgttcttcgacaccatcgccctggccggcaaggcccgctcctatggcctgcacaccgactcctcgcatcgcttcgagcgcggcgtcgacagccagttggcgcgcaaggccatggagcgcgcgacgcgcctgatcctcgacatcgtcggcggtgaaccggggccgatcgtcgagcaggtcagcgaagcgcacctgccgaaggtcgcgccgatcaccctgcgcgccgagcgcgtgacccagatgctcggcatgccgctggacgccgccgagatcgtgcgcctgctgcaagccctggagctgacggtggtagccgatggggaagggcagtggtcggtcggcgtaccgagccatcgcttcgacatttccctggaagtcgacctgatcgaggaactggcccgtctctacggatacaatcgcctgccggtgcgctacccgcaggcgcgcctggcgccgaacaacaagccggaagcgcgcgccgcgctgccgctgctgcggcgcctgctggtcgcccgcggctaccaggaagcgatcaccttcagcttcatcgatccggccctgttcgaactgttcgatccgggcacccagccgctgaccctggccaacccgatctccgccgacatggcggcgatgcgttccagcctctggccgggcctggtcaaggcgctgcagcacaacctcaaccgccagcagtcgcgggtccgcctgttcgaaagcggcctgcgcttcgtcggtcaactggaaggcctgaagcaggaagccatgctcgccggcgccatctgcggcaagcgcctgccggaaggctgggccaacggtcgtgacggcgtggacttcttcgacgccaaggccgatgtcgaggcagtgctggccagtgccggcgccctcggcgacttcagcttcgtgcccggtgagcacccggcgctgcacccggggcagaccgcgcgcatcgagcgggacgggcggctggtcggctacctgggcgcgctgcatccggaactggcgaagaaactcgacctcgagcagccggtgttcctcttcgagctgctgctggccgaagtggtcgacggccacctgccgaagttccgcgagctgtcgcgcttccccgaagtgcgccgcgacctggcgctgttggtggaccaggacgtgccggcacaagacatcctgacacaaatccgtgcggcggccggcgaatggctgacggacctcaggctgtttgatgtgtatcacggtaaaggcattgatccgcatagaaaaagccttgccgtcggcttgacctggcagcatccatcgcgcactcttaatgacgatgaagtcaatagcacgacgcagaacatcgtcacgtcgttggaagaaaggttcaatgccacgttaaggaaatagcgtatgggggctctgacgaaagctgaaattgcggaacgtctgtacgaagagctgggcctgaacaaacgggaagccaaggagttggtggagctgttcttcgaagagatccgccaggcgctggagcataacgagcaggtcaagttgtccggtttcggcaacttcgacctgcgcgacaagcgccagcgccccggacgcaacccgaagaccggcgaagaaatcccgatcacggcccgccgcgttgtcacctttcgtccagggcagaaactgaaggccagggttgaggcatatgctggaaccaagtcataacgacgagctgccaccgattcccggcaagcgctacttcaccatcggcgaagtcagcgacttgtgcgcggtcaagccccacgtgctgcgctactgggagcaggagttcccgcagctcaacccggtgaagcgccgcggaaatcgccgctattatcagcgccaggacgtgctgatgatccgccagatccgcgcgctcctctacgaccagggcttcaccatcggcggggcgcgccagcgcctctccggcgacgaggccaaggacgacgtcacccagtacaagcagctcatccgccagatgatcgccgagctggaagaagtcctgctagtcctgaagaagtgacagaagcaaaaaaaacttccacttatcagaagcttagtatatagtgcggctcacttcggaagcacagccactgagctcggaagtacagtcggggcgtagcgcagcctggtagcgcacttgcatggggtgcaaggggtcgagtgttcgaatcactccgtcccgaccaaaaatccctagaaaatccagtcacttagcggtgactggatttttttatgcctgatgcttttggtaaggccgttaaagagcgcctcactggttgccaattgagattggcttttctgtattctgagttgaaacgaaaccgaagggtttggttgcctttgtacttgaaaagtatctttgagtagggagcgcgaagctattggccatccttaccgaacaccagcgccagtactacgcttggctgctgacccgacgagctgcaggggattcggttgaatcgcttgcctcaacgctggttgactcgcaggttgatctcaaccctcatcaggtcgatgcggcactgttcgcctgccgcaacccgctatcccgtggagtgatcctagccgacgaggttggcctgggtaagaccatcgaggccgggttggtcatttcacagcgttgggccgagcgccgtcggcgcatcctgatcatcgctccagccaacctacgcaagcagtggcaccaggagctgcaggacaagttcaacctgcaaggcctgattctggaaaccaagagctacaacgcgctccgcaagcaaggcgtcaggaatcccttcgtgttcgcctgtggtccagtgatctgctcctaccagttcgccaaggccaaggcgaaggacgtcaaggcaattgcctgggatctggtggtgctggatgaggctcatcgcctgcgcaacgtctacaagagcaataacgtcatcggcaagacgctgaaggatgccctagctcatgtgcattccaaggtgctgttgaccgcgacgccgctgcagaactcgctgctcgaactgtacgggctggtcagcatgatcgatgaccgagtctttggtgatatcgacagcttccgcgcccagttcgtcaactccgacagagcgcaggcctttggcggtttgcggcaacgcctgggcagcgtttgcaagcgcaccctgcgccgccaggtgcaacagtacgttccctataccgcaaggcgcgcgattgttcaggaattcatccccagccaagaagagcgtgagctctccagtctggtggccgaatacctgcgtcgcccgaacctcaatgccctgcccgaaggccagcggcaactgatttctctggtgctctggaagctgctggcgtcttcgacccatgcgattgccggggcactggataccatggccagacgcctgcagggcagcctcgataaatcggctgaagtcatcgacctcactcagatcctggacgaagactacgaaggctttgatgagttggccgacgaaagcgaaaaggagctggacggcgaagaggtagtaaccctctccgctggcgagcgcgatgccattgcggctgagatcgccgagctgcagcagttcaagaacctggccaccagcatccgtgaaaacgccaagggcaaggcactactgatcgcactggtgcgtgcctttgccgagcttgaacgtcttgacgccgcacgcaaggccatcatctttaccgagtcgcggcgcacccaggactacctgctgtcgctgctggccgatacgccctatggcgaaggcatcgtgcttttcaatggcaccaacaccgatgccacagcccagcgcatctacaaggactggctgcagcgccacgccggcagtgatcgcatcaccggctccaagaccgccgatacccgcgccgcgctggtcgagcacttcaaggagcgcggcaccatcatgatcgccaccgaggcaggggctgaaggtatcaacctgcagttctgctcgctggtgatcaactacgacctgccctggaatccgcagcgcattgagcagcgcatcggccgctgccaccgctacggccaaaagcacgacgtggtggtggtgaacttcgtcgaccgcagcaacgaggcggatgcacgggtctacgaactgctggccgagaaattccagctgttcgagggcgtattcggcgcaagcgacgaggtgctgggctccatcggctccggtgtcgacttcgagcgccgtattgctgatatttaccagaactgccgtgatcctgaagagatcaagcgcagcttcgagcagctgcagttgcaactgtccggggaaatcagcgaggcgatggtcaagacccgccaggtgctgctggagaacttcgacgaagaggtacaggacaagctgcgtatccgtgccgaagacagcagcgccacccgcaatcgcttcgaacgcctgctgctcgacctgacccgtgctgaactcaacgactacgctcgcttcgatggtgacagctttgagctgcacagactgccagctggcagcgctgctggcattgccctggggcgctacgagctgcctcgccgtgccggcgagtcgcacctgtaccgtctcggacacccgttggctgcttgggtgatcgaccaggccaagagccgcccgctcgatcagcaaccggccgccagactggtattcgactacgccgcctatggctcccggatcagcaccctggagcccttgcgtagccagcgtggctggctagccctgaaactgttctccgtcgaggcgctgggcaacctggagcagcatctggtcgtttccgccgtcacggctgacgggcaggcgctgccagaagatgacccggaaaagctgctgcgcctgccggcacgcctggagcagagggactcagcagcagccggaacgacactgctagccgacgacctggagcagcgcaagaataagctgctgcgcgagatcaaccaacgcaacatcggttacttcgatcaggagctcgccaagctcgacgcctgggtggaagacctcaagctggggctggagcaagaaatcaaggcgattgatggtgagatcaaggaagtacgccgaatcgcagcgactgcggcgatgctggaagagaagctcggctaccagaagcagcagcgtgagctggaaggtaagcgcaacaagctgcgccgcgagctgtatgcccgccaggatgagatcgatgcagagcgcaacgagctaatcgatcagctggagcagcagctgcagcaacaggtagaggaagtcaccctgttcaaggtggagtgggtactgcaatgacaaggcagatgtgcaacaggaaggcctcgacatgatcaagcaggtcaatgactcagatcagatctcgcgactggttctgcgcggctacaagtccatcgcctactgtgacctagagctgagccggctaaacgtgttgataggagccaacggcgccggaagatatcaacgacagcccgcagactgccccctccaagcgcatcctcgccgccatgcccggctaccagaagaccctgtatggcccgttgatcgcctgcgatattgggcgggatgcgatgcgggcagggtgtttgcacttttcgcagtgcctggaaaaattgaatcgcttgtatgaaagggagtttgggttgatggggaagccacaaggtcttgtgaaagagatgagtttttcagagattttcggaggccaaggctgatggctgcgcttgccccggactacatgatcattctcaagaggattctgcttgagcgatttgtagattcactgccaccactgctggacacgaagaagccaccagcggagcagcaagacaagcaactttcgcgtgcgttcagtgcttttgtgctgcataagctgcttgatctggcaccagtggaggccgcagcagcggttgtggatgacttccatgacaagggcattgatgccatctactaccatcagtcatcggagacgctctacctgctgcagactaagctgagagagtcagagcagttcaagcaggaggatgcacaatcgttctgtgaaggggttcgtctgttgttgaagcagcggtttgctgccttcaacctgaatgtgcagcagcgccaggctgagatcgaggcggcactggatgcctgcagccgcattgagctggttgtgccctacacgggtgatagtgtctcgaagaatgccagtgataccctgcaggcactgcttgatgacgaagaccttgatgaggagcgtctggtcaggcaggtgaagtactacgcagcagatgagatcactagcgatcttctggctgaagaggcctactcgccggtgaatgctgacgttttcctgcagaagtgcagcaagattgaggagccccgtgcgacttactatggccttgccaggctttctgatctggttgcgttacacgagaaccatggtaaggcgctttacgagcgcaacattcgatacttccttggcagtagcaaatccgacgtcaatgttgccatccagacgaccctgcgcgatgctcctgagaagtttttctacctcaataatggcgtcacggcggtttgtgaccatgttgatgagaaaggtaagaaacctgccacaggctttcggaggtaccaggtcagagggctgtccataatcaacggtgcgcagacggtcgcctctgctgccgagtttgtagcacagaacccgcagagcgatatcgagagcgcgaaggtgctgctcaccctgatcaaggcgcccgctgctggcgattttggcaagcaggtcaccagggctcgtaatcaccagaacccggtgcagatggcgaactttgctgctctagacgagaatcaggagcggttgcgccaagagattgcgctcctgggcttcgactatcattatcgccccgaggcgcggggggaaagcgctgcagccgtcactcttgatgaggcggcccgagcgcttgcgctgctgcaagctgatccccgtcatgtcagctggctcaagagtgatgctacacgacttaccaacacggattccgctgagtatcagttgcttttcgcgaagaccttgtcaggcgccgtgttggtcaacaccgtgctgtgccagcgagttatgcgtgggttgctgaaagagagcgagcaacatgcaccggctggcagccaagagcggttgatctaccgccatggcatcaacgtgatcatggcagtcatgctgaagcagctgagcactcatattgagggaggggcagtgcttgatgttgccaaggttagtgccttggtcagccggccgcttgatgagctccgccagcgttctgtggatctttggcagcaacagcatcaaaacgaggggccactggcctttttcaaggcgatggatcgtacaacgccattccttattgcccttatgaaaaagcagtacgggcttgagggttttcaggaagaaagaaatccggaaaggctcggtcgtcttgctcaggaaggaattagcctcacacaagatctggtcgagcgtttgtccaaggctgccccgcagctgaaagagagcaagaaatgagcaagcaaaaactcgaactcacttggatcggcaaagacaagcgccccaagttggagccgcgcatcctgctggaggacccgtccaagtcctattactccagccatcgtgtgacggaaaacgacatcttcgaaaaccggctgatattcggtgacaacttgctggccctgaaggcgctggagcaggagtttgccggtaaggtgaagtgcgtgttcatcgacccgccgtacaacaccggcagtgcttttagccattacgatgacgggctggagcactcgatctggctaagcttaatcagagaccggttggaaatcattaaacggctgctttctgatgatgggtcgctgtggatctcgattgacgacaacgaggcacactatcttaaggttctgtgcgacgaggtgtttggccgtagatcgtttgtcacgtcatttatttggaggaaagttgatagcccaaacgacaataagggtgctatatctcctgatcatgaatatattttgtgttacgccaaggatcctgacttagtcaggttccggccgaagcaggatgaatcgattctaaatgcttataggcagccagactcagagtcgggcaggccataccgtgatcgtcttctgaagaagaatggtaaaaatagtcttagagctgaccgtccatcaatgtatttccctattaaagggcctgatggggcggacgtatatccaatacacgatgacggccaagaagcacgatgggcaatgggaaagaaaggtgttgatgaacttgtccaaaaaggtgagttagtttggaagcagagggaaatcggtggagtgcctcggtggattccttatacaagagagtatgcccccgaaacgcctactcggccctggccgactatctggtctgatttgcataccacccgccagacaaaagcgcatcagagagacgttttaactggcgtttccacatttgaaacaccaaaacccgaagatttgatatcacgtatcctgaatgtatgtaccaatacgggggactgggttcttgattcctttgctgggtcaggaacgactggagcggcggcccataaaatggggcgccgctgggtcatggtcgagctgggagagcactgtcatacccacgtcattccgcggctgaaaaaagttatcgatggcactgaccagggcggcatcagccaggcggtcaactggcaaggcggcggcggcttccgctactacaagttggccccctcattgatcgtcaacgaccggtggggcaacccagtgatcaatcccgagtacaacgctgccatgttggccgaagctttggccaagctggaaggcttcacctatgcgccctcggaagctcactggtggcaacatggccattccagcgagcgcgatttcatctacatcactacccagaacctgtctgcccagcagctgcaggcgctggccgacgaggtcggagccgagcagagcctgctggtctgctgtgctgccttccacggcgtgaccgccacccaggccgaagcacgctggccgaacctgacgctgaagaagatccccaagatggtgctatcgcgctgcgagtggggccacgacgactacagcctgaacgtcgctaatctgccgctggccgagcaacccgttgccgcgcccgatccggtgaaaaaagcaaaaaaaaacaaggttgctgagccagcacaagccgcgctgtttggtgaagacgagtcgtgatgtctgaaggccgcgtaaagcctgcaggttacaaggaacaaaggaagacagtatgagcggttcgcgtattcaacatcacgtttccgggcgcctgtcgctgcgcccgccgcaggccgagtcgctggccaagctggtgcaggcgctgggcgctgcgccggagctgctggagcatcagcagaatgtgccggccatcctcgccaccctgaaggcccagtttccgaccctggaggacttcgagcgcgatttcccctcgctgtgcttcgctctggccaccggtgtggggaaaacccggctgatgggcgccttcattgcctatttgcaccttgagcaccagatcaacaacttctttgtgctcgcgccgaacctgaccatctacaacaagctgatcagcgacttcaccccgaatacgcccaagtacgtgttcaagggcatcggtgagttctctatcaacgtgccgagggtcatcaccggtgacaactatgaccagcagaacatcttgggcggtgagctgttcggcgaggtgcgcatcaacatcttcaacatctccaaaatcaactccgaggtgcgcgggggcaaggagccgcgcatcaagcggatgcgtgaggtgctgggcgacagctacttcaatcatctggccagcctggacgatctggtgctgctgatggacgagtcgcaccgctaccgtgcccaggccgggatgcgggcgatcaacgaactcaagccgctgtttggtctggaagtaaccgccacgcccttcacggagtcgagcaaggggccggtaccgttcaagaacgtggtgatggattacccactggcccgcgccatcgaagacggcttcgtcaaggaacccgccgtagtcacacagcgtgagttcaaccccaagcagcatgcgccggacgtggtggaacgggtcaagctggaggacggcgtgcgactgcacgaggcgaccaaggccgaattgctgacctacgcacgcgaaaacgatgccaaggtggtgaagccttttatgctggtgatcgctcgcgacaccacacatgccgggcaactgctggcgttgctggagtcggatgccttctttgaggggcgctatcgcggcaaggccatccaggtcgactccagtaagagcggcaaggatgaagaggaaatgatcacccgactgctggccgtggaaagcgtgggtgagccgaccgagattgttattcacgtcaacatgctcaaggaaggctgggacgttaccaacctgtacaccatcgttccgctgcgggccgccaatgcacgcacgctgattgagcaatccatcggccgcggcctgcgcctgccttatggcaagcgcaccgaagtggaggcggtggatcgcctgaacatcgtcgctcacgacaaattccaggaaatcattgacgaggccaaccgtggtgattcgccgatccgcctcaagcaggtgatcctcgatgcgcctaaggcggacgacgataagaccagcgtgcaggtgcagtcaggtgcgcatgcgatgctcggcctgagcgaaagtgcagagcaggcggttgcttcgcaggagagcaagcctggcgagacaagcagctccggtgcgaatgccgaaacacagaagcctacgccgattttcaccaccgaagcggagaagcaggctgcccgtgtggtgatggaggtgatcggccagtatgaaactcgtcgtgatctggtgtcgggcagtaaggatctgctgaagaaggaagtacaggagcagatcaaggctgaagtagccgagcgcctcaagcctcagcagggcacgctattggaaggccaggacgcgagcacacctgagctgaatctggaggaggtggtggccaagaccaccgaagtggtggtgcagcagaccatcgatattccacgcatcacggtggtgccgaccggtgaggtaatctcgggctaccacccgttcaccctgggctgtctgcccaactaccagccgggccagcgcgagctcctcgtgcaagagctacgcaccagcaagcagtccacgctgtgtcgtgaaagcggtatccgcgagaagcgcctcgaggactatatcgtcaagaagctgattgacttcgatgatgttgattatttcacccaggccgagctgctctacgacttggccggacaggcggtggcctactaccagaagcagaactacgccgaaagcgagctgcacgaaatcctcgatacccgcggtgcagatttggctcgcctaatccatgcagaaatgcacaagcacttctgggaagaggtcagtggctacgaggtaaaggtcagccgcggtttcaccgagctcaaaccctgcaactatacggttgccgctaaccagccggtacacagcgtgcgcgagacagtcaccgagaccagccgtatcaagcagatgctgttcggcggattcacccgctgcctgtatccgctgcagaagttcgattcggacaccgagcggcgttttgccgtgatcctcgagcgcgaggcgctgaaatggcttaagccggctaaggggcagttccagatcttctacaagctcggtgctgagcagccggagtatgtgccggacttcgtagtggagacggacagctgcattttcctcgccgaaaccaaggctgccagcgacctggagacccaggaagtgcaggccaaggctgccgctgctgcacagtgggccaagcatgcgtccgactacgcaaagagcgtcggcggtaagccctggaagtacctgctgatcccgcacagcgaagtaaccgaggcgaagcggctgatggactatctgcggtttgaggtgaaggcgccggtatcggtcgctggctgaaaggcttaatggacaatcaacccgaatgcgctccaggtgcgttatgtgtctggagtatgaggttttctgcatgcggagcggactttgaagatgagagccggccgcaaaggtacatccgagggagcgaagtgaaagcgaccgaagccaatctgctcaagtttctccgcaagtcaccgcagtttgtcattccgatttatcagcgcaactactcgtggacggaggagcagtgccgccagctttggtcggacatcctgcgcgctgggcgagaaaagtccgtcaacgctcacttcatcggctccatcgtgtatatcgagcgtgccctatcgtcggtcaccagcccggaagccctgctggtcatcgatgggcagcagcgcctgacaacctgtacgctgctgatcgctgctttggccagccatatcgcgagtcttcctgccgatcaattggaggcgcttgatgaactgcttgagacgttctcggccaggaagctgcgcaactactatctgctcaacccggacgaggacggggatcgccgcttcaagttgattctttcggaaaccgacaaggaaacgctgctggcgatcctcaagcagtcgccgattcctgccgaacacagcacccgtatccaagagaactttcagcttttccagtccctgcttaaccagaacagttgcgagctggttgcgatctgtgaagggctcgcgaagctggtcatcgtcgatgtctcccttgatcgcggtcaggataatccgcagctgatcttcgagagcatgaactccaccggcctggagctcagtcaggccgatcttatccgcaactacatcctcatgggactggagcctgcgctgcagacggagctgtataaaagctactggcgccccatggaaaaagccttcggccaggcggcttatacccagcactttgatgcattcatgcggcactacctgaccacaaagacgggcgacattccgaatgtccgcgaggtctatgtcgctttcaagagctatgcccgcaacctgaaaaacgatgtttctgcgttggtagccgacatccacgcctacgcaacttattactgcgccattgcgctgggtgcggaaagccatccgcagctcaggcaggcactccatgatcttcgcgaactgaaggtcgaggttgcataccccttcctgctggatgcctaccatgactacaagacggaagctctgagcgcagacgagctacgccaggtcatacgcctggtggaaagctatgtatttcgccgagcagtctgcaacatcccgacaaattcgctgaacaagacattcgcaggcctctcgcgcaccctgaagaaggaccgctatctggaaagtgtgcaggccagtttcatgctgctgccttcataccgccgctttcccagtgatgacgaattccagcgcgagctcaagcagcgagatctctacaacttccgtagccgcagttactggcttcgtcgtcttgaaaatcatggaaggaaagagcgtgtcgccatcgaggactacaccatcgagcacattctcccgcagaacccggagctttccccgagctggcaggtcgagcttggcgaggactggaaggctgtccaggaaacatggctgcacacgctcggcaacctgaccttgacgggttacaacagcgagtatcgcgatcacccgtttgcgttcaagcgagaccaggttatcgacaaggatggaaaccccgtagggttcgcacacagcccgctcaggctgaatcaagggctgggcactgctgaaaaatgggacgaagcggcaatcaaacaccgggccgagcgcctggccaaggaggcggcgaaggtctgggatgctccacggctggctgcggacatcctcgatgcatatcgcccatcgagtcttccgactggcaaccagtacagcatcgacgatcacccgcaccttgcatcaggtcccgttcgtgagcttttcgaaagcctgcgcacagcggttcaggagctcgatccctgcgttaaggaggacgtactcaagctatatatcgcctacaagtcagaaaccaactttgtcgatgtggtgccacaagccaagcggctgcggctgtcgctcaacatgcccttccatgagatcgatgatccgaaggggctatgccgtgatgtcacgaacctggggcgctggggaaatggcgacgtcgaagttgccctcgccagcgaggaggaactgccctatgtgatggggcttataaggcagtcgtttgaccggcagatgggagacatctagtgagactgattaggttcggtacagcagttacttcatgaaaatcatccgtctgaaagtagtcctcgagaccaccggcctggctcgctccactatctataagcttattggtgagggcgggttcccgaaacctgttccattggcgggccgtagcgtaggatgggtcgaaagtgaagttcattactggatcaaaggcaggatttccctgcgagatctcataaactctcctcgataacctgacgctggtggctaccgccttgcgaacacggtgttacgcttttgttgctggcgttttgcctttagggtgcaatcaggcatttgcagtagcagggatcgcgtcagggatgtcatcagttccccaactcaagagcttggtcatcgatctggaggtcgctcccggtaaggaagggcatccagatcgtatctttaaggtcggggcagcgcgacctgacctcggtgtcgagcttgatagtaaggtctagaaaaatctccccgagattcttgctgaagtcgatgcgctgtccgatggtgcaggctttcttctggggcataaggcttaaacggctcatgcaaatgagatgcctacggcgtcagtggaacgggtggacagaaggctcgctcaggccgtggtgacctgcccccagttttagtaccgctgcctagttagtaggccctggggttgatattaatttttcctgcttcagctgctgctggcgagttcgccaacttgcagcaaattctgctggggtgagattgccaatcgcgctgtgcggtcggtgttcgttgtaatcccgccgccaggccgcgatgcggattctcgcttcggccagcgaacagaaccagtgctcattgaggcattcgtcccggaacttaccgttgaacgactcgatgaaggcattctgcgtgggcttaccaggctgaatcagcttcagcttgatgtcgcgctgataggcccattgatcgaatgccttgccggtgaactcgggcccctggtcggtgcggatcgctttcgggtagccgcgaaaccgcgccatctcgtccagcgcccgtgtgacgcgaaagccgctgataccgtgctccaccaggatgccgaccgactccttggtgaagtcatcgaccaccgtcaggcatttgatccgccgcccggtgctcagtgcatcgaagacgaagtccatcgaccagacctggtttggtgcgctcggcaaactcagacgttcgcgctccaccgcgacgccatggcggcgccgccgccgtttcaccatcaagccggcagcgcggtacaggcgatagatccgcttgtggttgacctgcacgccagcacgtcgcagcaggatgtgcaggcggcgatagccaaagcgccggcgctcttgggccagttccaccagttgggcttgcagctcggtgttttgcacactggctcgcggctggtagcgcaacaccgagcgggacagcccgatcaactgacaggcacgacgctcggagatgccagttcgcgcctgcatctcctgcaccgcctcccgccgtgctgtcgggcttacccttttccccgggcgaccactttcagcgactcgatgtcgaggtgggcctcggcgagcaacttcttcaatcggctgttttccagttcaagatccttcaaccgtttggcgtccgccacggtcataccgccaaacttggcccgccaggtgtagaacgaggcatcactgaagccgtgtcggcgacacagttccttcaccggcacaccggcctccgcctgcttgaggaagtcgagaatctgctcttcggtaaaacgctttttcactgccgtctcctgctcggaaaacggactctactaagtttgacgtggtactgaaatcggggggcaggtcagctcctattggcaatcgagcctcccgccactacgcagtcacccttgaggtgcgaggtgatccgaccaggatcacccggcctgcccgcgcccatccagcaagccttagctcacccaaacaggatcacacggagacttgcggcttgacttttatatcgaaattgatataaaattgagttactggccacagtaaatcaatggcgccagggttcccctcaatgagggcctcctggcacgtgtgtccagcaatcaaccgaggaaaagccatgaaacggcataacggtcaatattttgggcgaagacggagggaacatgcagcaagagcagacgaaggaagtgaagttcgtagacagcagcctggacgatctgcgggacttgcccgctgaagtcatgcaacgagtgggttaccagcttaatctggtccagcatggggatgagcccactgactggaagccgatgacaacggtcggtccaggtgtaatggaaatccgggtgagttttaaaggggcttttcgcgtgttctatgtggctaaccggcctgacgcgatctacgtgctacatgtcttccagaagaccacacagcagacggaaaagcgtgatatcgacctggccaaagccaggctgaaatcactggactgagggtgttgggatatccctctccggctacggaatggccgtgagggggctcatcaacacagggtcctgactctacagcaacacatactcatcaagaggtaacaaacagatggcaaacgaacgcgctaccagtgtctgggatgcgctggttgattcgccagaagaagccgaaaacctgcgtatccgttcccaactcatgcgggctctcacccgtactgtcaagggctgggatcttccgcaaaaagatgctgctgctcgcctgcgagtgacgcagccgagattgaatgacctgctcaaaggcaagattgacaagttctctctggacgccctggtaaacctgctgggcgcggctgatctggctcttgagatatcggtgatcccacgcgcagcataagccgtgggggcgcagcctgattgcggtcaccgagtggttgcacgacagcataagtactacccacaagccctgcctgaaatggcagggctttttcatttcagggcttcgctacagcccgtgaaactgccttgtttgtacatttagcaagtagtgtagtgacagtaaagcactggctcatctcctagcccctctggcatgttgacgcttgcaggtgctgtgcagctaactgcgcccgggtgagcagggagaggaaatgtcgaaaacttacgaagtacgggtggtcagtacccagaagaaatattccagggaattccaggtcaagaacgaattcgaggatggctggaaatcggtcctgcaacgagcacacggtacccctgtggtctgcctgtgccccggcaagggtaatcgctatctctcggtgaaacatcgggaggggagcgacaactatcaccttgcccggtacgccaacaccggtccggagcatgcaaacgactgccgattccatgctcacgccccagagcgatcaggcctgcagggctacgctgagggagttgtagaggaggccgatgacaacaccctgcgcatccggctagcccatggccttcgagtcaaagaagcgtctcccgccgccgatgacgtggccgacgttccgcgtacgccgggggttaagaagccttcgatacgtctgctcgggctgctccagctgctgtggttagaggctggactggccaactggtacccactgatggaaggcaagcgaacgcccgcgaatgttgcctattgggtatctgaagccgcaaagcgtatccgggccagccgaatgacggtgttcgacgtcttgctgatgtcggccaagaagaactcccgcatggcgaagcgcaatgctgaggtcgtggagctggcgcaggagcattcgcgcaggctcattgcggtgtcgccgctggcgtccttcaactcggaacgacgcaatctcttgacgctttctgtctcgggacccttcgggatgccgacgatggacattcgagcggaggttcggcgccgagttgaacgtagctttgcttctgagctagtcgcgtgggagtctgggcacgaggttattgtgatcgcgcagctgaatctgaagaaggggcgctacgcggatgtcctggatttggcgctgatgcgcgtcagcgaccggatgattccgctcgactccggctacgaagccacaattgaggaaaagctccacgccgagggacgtgccttcttcaagcccccacgctttgaagctgaggatgaaatttttcctgacttctggctgctagacatgggccgtgacacgcaatatcccctggaggtattcgggatgaatacgccgacgtaccaggcgcgccgacagagaaagattcgttggtacaacggtcagttcggttccgctggctggtggcactgggatgccttcatcgataccaaaggggaggggatcccaggcttcccagaacgaacgatcgattaccgcagtagagaaaatgaagaaaccgccggcgaagacgtaccggaatctgtagccgataccgaatagccacataacaatgcccgctcgagcgggcattttgattggttcgtggtgagcgcggtcatgtcttacaagccggcggtttcgggcccgcaatgcacccgctggattacaggccttcggccaggacctggtcgatgcagtcgacaaagtagtccacgctatcacgcgctgattctgctcaaccgagatgcgttctataccgtagggcggctgcagtcggaaacccctaacatgattagccgtttgcaggaggcttgggctagcaccctggggctgcagatcaatcaggtgggggcgaactaccagacaacgcgatgtacaaggtggagtgagcatttgtagtggtctactgatcccggacaccgatttaggcgaaaatcctcgccgggagagaggtgtctgatgagcaagcaacgacgtacgttttccgccgagttcaaacgagaggccgcggccctggtgttggaccaaggctacagccatatcgacgcctgccgttcgctgggggtggtggattcggccttgcgccgttgggtgaagcagctcgaggcggagcgccagggtgtgaccccgaagagcaaggcgttgacgcctgagcagcaaaagatccaggagctggaagcccggatcaaccggttggagcgggagaaagcgatattaaaaaaggctaccgctctcttgatgtcggacgaactcgatcgtacgcgctgatagaccagttgagtgagcaggagtcggtggaagtggtctgttcagctttcgatgtggcgcggtcttgctactacgtcccccgtcttcgacgtcgtcgggtcgatgcgcgccgcgtggcgctacgcagccagctcaaccagttgttctaccagagtcggggctcggctggcagtcgcagcatcctgggcatgctgcgcgaagagggcgtgaccattggccgtttccgagtgcgtcggttgatgcgtgagctgggcttggtcagcaagcaaccgggctcgcacgcctatagacaggccatgttgagcggccggatatcccaaatcggctgaaccgcgaactcgcgaccgagtatcccaattaggcgtggagtggcgacatcacctacatctgggcgcaaggccgctggcattacctggcggcggtgctggatctgcagacacggcgggtgatcggctgggcgctctcggtcaagccggatgccgagctggtgatcaaggccctggacatggcctacgaacagcgcggcaagccacagcaggtgctgttccattcggatcagggctgcccggatcgaatgcctcgccgaggcgccagccggccccttcacaaccccctctgccgcaccacccccatctcccgctgctcctcctcgccaatctccttcaacgccacttcccccactcccagcgcgcgttccacgctgagttcgccgccctgggcggcgagcagggcctggaggcgttggaactcgccgcaccagagggtttcgatgtcgcggtcgcgctggctgtcgcggttggcgttgagggcgacggcgcgcagttgcaggcggccgttgtcggccttgccgccgacttccaggccgtagccgggggtggcgggtttgcgcaggacgaccctgccggtctgcgcccaggcggtggccatgccttcgcggacttcgtagccgaggctggcgaggccctggagcacggcctggcggcgggcgagggcaacctgttgctggaggtgggcggtgaggatggcgttgcatcgctcggtgagttcggcgagttgctgcggatcgctgtccggctggcaggcggcggcgcgctggagcagttcggcgtgttcggcggcgccgagggcggcgacttcgctggcgaggtcttgcaggtgttccagtcgctggcgttgctgctggtgttcgcgggcggcctgggcgaggtcgaggaccaggctgtcgagcagcaggttgcggcgctccgggcgctgttcggcttcggcgcgggccagtcgctcgaggaacgcttgggcgctggcctcgccttgcagcagttgcagttcggcgatgtgccggtcgatgcgcgccaggcgctgttcgcgcggggcgtcctgttgctggcgggcgcgccactgttccagggtgataggcgcttcgtcggtcttcaggcgctgggcgagttcgtgctgggctgcgctgaggcgttcttcgacgggggcgctggcgagggcggcgaagccttgggcgagcagggcttccgcgtcgtcgcggagggcgccgttggccagcgcttgcagggtttgccggagtgccgcgctggcggcatcgggcctggcgtcgagggcctggagcagggcgctggcgttttcctggaggcggcggtgttgctggcgcgtttccgcggcctggcgaatggcgcgctcttcgcgttcggcgaggtcgcgcttgaggaattcgctttcgatcttcacctgcaattgcacatccagccagcgttcctgttcgagcagggcgtgcaggctggcgcggcgggcgtgggcggcggcgcgctcggcgtcgctgagctgggcgagccggctggcctggttttcccagcgcgcgagggccttgtccaggcgttgcaggtcgcgctcgcaggtggcgatggcttcttcccgggtgacgattcttacaactttcggtccgctcattgggaggcctccgctgctgccgtgggatgggtttccgcgctaggcgccagggctttctcgatggcggcgcgcagtcgcgcgcgttcgttgtcgccgtcgtggtaccagccctgggaggaaacccggtggaggtgcgggatcgcccgccgcagcaccgagggtcgccagatttcccgggcgcgggcgcgttccagcagcgggtggcagggggcgtcgcattcgatgccgatggcgtagaggccggtggccgggttctcgatggcgaagtcgaggccgaaggcgtcgccttcgctggcgggtgcggcggaccagcccagcgagcggatgtactcgccgacgatctcgctgaagccgtcgtgccgctggtagtgctggcggcgctggtcgctgcggtcggtgtgcaggcgctcgagcagttggccggtaccggcgaactcgccggcggacagtgcccgggcgtattccaggtagccttgcaggtagtcgcgcgggctgctcggcgagcgctgggtgccgagcatgtcggagatgtcgccgatcggcatcgaggtgatcatcaccaccttgcgccgcgcgcgggtcaccgccacgttgaggcggcgctcgccgccggtctgcccgagcacgccgaagttgcgccggaagctgccctggccgttgcggccgaaggtggaggagaagacgatcacgtcgcgctcgtcgccctgcacgttctccacgttcttcacgaacacgcccatgtcctcgccgtcttcgctgcgctcgcgctcctcgctgtaggcggcgcggaacgtctcgtcctgctcggcgcgcagttccaggcgctcctcgatgaggtcggcctgcttgcggttgaaggtgaccacgcccaccgacggccgcgccgcgtagggttggcgccagagttcggcgaggtagtcgacgactcgctcggcctcgcgctcgttgctctggttctggtacaggccgttcacctggatcagttccagcggcttgatgcgcaggatgttggcctgcggatggcgtaccggcacgctcaggcggttgccgtagaacgaggcgttggagaagccgatcagctcgcggtaggccgagcggtagtggatctgcagggtggtgctgggcagggcgttgcgcgccagttgcaggaggtccgggcagtccttgatctcgcggcggttccaggtgtcctcgtaggcttcgcgctgctcctcgtcggcgtcctcgtcgggcgcttcgccgtcgaacagttcggcctcgtcgctttccacgcggctggagaagaacgcggtcggcggcatctgcttctcgtcgccgctgaccaccgtgacccgcccgcgatagagggtcggcagggcgaactccaccggcatctgcgaggcttcgtcgtagatcaccatgtcgaacagcccggccttgagcggcagcacgcggctggccaggtcggggttcatcagccagaccgggcgcaggctcatcaggccgagttcggtgcccagctcgatgaactcgcgcaggcgccgcgagcgcttgccggtcaggcgggtgacgtcttcccactgcttgcggctgcccaggcgcgcggcgtcgatgcccttgccgagcagttcgcggttcagcgcgcgcatctgcacatcggcttcggcgaggctggcgaccctggccctggcttcgtcctggctgaacagcagttccggattgtcttgttccaggcgttgcttccagcccagccgcgcttcgcggttgagcatgcggcgcaccgtggcttcgagtgcttcggcgggaatcgcgtcgagtcgttcctggcgctggcgcagcagggccaggaattccaggtcggtggcttcgagctggttggcgcggccacggaagcgctggtaggcgaccagttgcggcagcgcctcgcgcaggcggccgagggccggcaggttgctctggttgccggcgatggcgcggtgcagctgttccagcagttcgtcgccgagccagtcggcgagcaccttcagtttgtccaggctgagctggcgtgcggcctggcggatcagcgcggcgtcgaggtcgccgagcagcgcttcgaagcgctgtttctcgccggtgaggatcaccgcgtcgagctgctcggcgcgcggcgcttgggccaggccacgagccaggacctggatttcgcgcagttgctggctggcgtggccggccagaccggtcagttccggaccggcatcggtggcgactgtcgccagccccaggctctgttgcagcgccgccagttgccggcgcagcggccgccactggcgctccaggtcgcaggcgccgaggagggcggccaggcggctgtcgtcgtcggcctcgccgtgctcgcgcaggaagcgccgcaggcggccgcgccgcagcaggcgcagcgggttgagccgagccagccaggtgcgtgcctcgagcacctggcgggcgtgggcctggaagcgttcgaggttgttctcttcgagcatggcgagggccggcgacagcagcggcgcatgccgttcgaggtcgagctggcgcagttgccgttcgatctgctcggcctccgccaacaggccgtcgccacggctcggctgtcctggtgcggcgtcgcggaacagcggcagccagtgggccaggcgctggcgctgctcctcgcgcaaattcagcagggtaccgacctggcttgccagccaggcgcggtagggcgtcgggtcgtcgacctcgaagctcgccgggtgttcgtcgagggctttctgccgggcgttctccgcttcgccgaaggcgcgcaggctgtcggcgaaggcttgcagggtggcctggtcggtggcgaaggcgcgcagttgcgccagcgggctgccttcatagtgggccggtagccagaggcggaccagcggcgcgcagttttcctccaggcgcgccaggctgccgatgtccagcgccgccaggcgctggcgcagggccgggaagtccagcggcggcgagcctttctccagctcgatcagttcgccgagcagacgccggtagctcagcccggtggcctcgtccacgcggtgcaggctctggtggtagcggtccagttcgccttccagcgcctcaatacgcgccgccaggcgctcgcgctggcgctcccagccctgggcgccgccggcgtcggcgaacagcgcttcgagttgctcgcggatgttgcggatcaccggttcgcggtcgcggttgacgtcgttgagcatgacgatgcgctggcccaggccctcggccaccaggcgcttgtgcaccacttccagggcggcgtgcttctggcagacgatcagcaggctgcgctggcggccgatggcgtcggcgaccatgttgacgatggtctggctcttgccggtaccgggcgggccttccaccagcagccccgggctctgccgggcctgcaacacggcggcctcctgggacgggtcgctggccacggtgaagtagcgctgcaactccggcgggctctcgcgggcttccggctcgccgttctcgcgcaggcgcagcgcggtctccaggccagtgccggagggcggcaggctcttcaactggcgcaggtcctcgccgatcgcctggcccatgaaggtgacgtggaacagcaccgcggcgcaggccagttggtcctggtagggcgtgacctcggtggaactcggcggcaatccttccagcacccgcccgcgcggggtggcgagcaggccgaaggcatccatcacgtcggcggcgcgcagcgcggagcggccgagcaattcgtcggcgaccttgcgccagcgcttgcacggctcggggccgagcaggctttccagggccgggttgaggcgcacttcctcgcgctcgccgtcgaaggccagcgccacctggccgcggctgccgacttccagttgcagcttcagcggccacagtagcagcggcacgatgcgcgtgcgggtggtgccgcgcgggtcgcggttgagcaggaaggggaagcccaggtagaggccgtcgatgccggtgtcgcgcttgtacagcgagctttgccgggacagcgcgttgagccgcacttccagttgcgggttggcgaggaagctgtccgggtcgaggctcaccgcgcgggcgttgcgttgcagcagatggtcgagcagggcggcggcggggcgtcgcgcgctatccagttcgttgaggtcgatgcgtggagtgctcttgccgatgctcatgcgcaccagcggcccgcgcatcaccgcggcgaccactttcttctcgaagaaatcgaggatctgcgacacgtactgctgcttctgcggttccagccactgttccggcgggatcgccagcagcaccaggaccctcgccaacggcatgcgccgctccaggcggaactgctcggcccattcgtcgaccctgggcacgccgctgcgggcgaagccgctgatgcgttcgtcgacgcggcggtacagctcctgccgcgagtgctgcaacaggccgcgcgcggtctccgcgtcgaacaggtgcacatcggcgtcgcgggccaggccggcggcttcctcgacgatcgcctcggcggcacggaactggccgatgttggcgctgagcaggacgatcaggtcttcctcggcgatcacccggcgctcggccagggccagcaggccggggtgctcggtgtccggcaggaggcgctggcgctcctgccactgcgcggcgaggcgcgcccgcgaggtcgacagcaggtagatgcgcaactgttcttcggcgagttcgatgtgctggtgcagggcgcgctggcggacgttctcggcgcgggtcttgagccgcgacagccagctttcggtgtgcaactgttcgagcaggtcgggcaccgagccgctgatcagccggtagccctccagcggatgctccagcagccagccgggggtgacgatctcgccgcgctggatcagcgggatttccgggttcagcagcttgagcgccagcatcagccggaagtcgtcctccagcccctcgtgctgggccacctggcgcaggccggcgagcagcctgggtgacaggccgatgtgctcggcccaggtgacgatcgccccgcgcagcaggtggtcgagggcctccgcccagtgctcggcctgggccgcggccagggcgaagaccgtcggcttgcggaagcgccgggcgccgagggcgatgctggcgccttcggcgtcgtccttttcgctgtccgccgaggccggcgcgtccaccgcctcgccgttcagccaggcctgtacctgcggccactgccagcgctggtggcggtcgcgtgcaagcaggccgcgcagcagcaggtgcaactgcgggtcgaggtcgtcgggcagcgccacgccgttggccagcacgtggatcaggaaggcgttggcgttgactccttcgaagcaggcgccgcgggtcaactgctccagcaggatcatgcccaggctccaccagtcggaagccgccgccacgccgccggcgatcgcctcgggggccatgtagcggctggtctccagcggcgagacgatatccaggtcgaactccgacaggcgcgccgagccgaagccgctgatcaccaggtccagcggctcgtggctgcgcaccagcaggctggccgggcgcaggtcgcggtggcgcaggccggcttcgttgaacacgtgcagggcgtggcccagctcgcggaccacgtggcgcaccgcctcgcggtcctccagcacggtgccgagctcggcgaggctgccgccggtgagctcctcgaccacttcgtaggcgcgctcgtcccagcggccggtggcgaggatttccggtacgtgttcgcgcggcaggcggcggatcacgtcgtagatcgccgggtccggctcggcgcccgggcgatacagggtgagcaccgcctggcgggcgctttccgcgtgttcggccaggtagcgctcgcgcacgccgtcgctgctggcgatctgccgcagcagacgccagccgtcgatcagggtttccgtgacggcgggctgcggcgtggcctcggcctgcatcggcagcgggccttcggccggcgcggcgccgcactccaggcacatcaggtcgccgggttgcagcgggtggccgttggcgcagagcggggcggacgccgctggcggctcgctggcgggcggcgcgatggcttcctgggtcagcaccggctgtggtcgccagccggcgggatggatggcttcggcggaaaggtcccagccgcagggctggccctggatcgagccttcgcagaagatttccgaaagcgagcgttcgctctggcagttggggcagaaacgtatcatcggtatcgatccattcagcgcggccgatgggcgctgacgctaagttggtggccctgttcgcgcagcaggtcctgtagccgcagcaggtcgtcgcggcgcgggatgccggccatccacacgctgccgtcatggtcgaacatcaggtcgagggccttgtcgtcttcgcgcagtggccgctggtagccgccgaggcgcgcgcggccgagttcggtgagcaggctcaggcgctggttgtcgctgccgcgcagggccaggctctgttcggcgtgctgttggtaggggtcgctgatcagggcgtcgatcagcccggcggcctgttccagttgcgcgtgcagatgctccagcgggtagccgctgtagaccaggatgtcggcgcggctgcgctggcgcagttcgccgagcagggcgaggagggcagcgaactgctcgaagggttcaccgccggagacggtgatgccctcggcctgctccagccatggctggatgtcggcgagcaggcgtgccagggcgatgcgccgccgtcccggcccccaggtatcggcggagatgcagccggggcagcggatgctacagccctggaaccagatgcccaggcgccgtcccgggcccagggtggtcaccgggaaatgcacccgcgacaggctcagttccatctcagcggcgttccagggtcaggccgtcggcgtccagggcgctgatcaggaagcgctcgcccggctgcgcgtcctggtcgaacagtgcccgcgacaacgggttgagcaggcgcgcttcgagctggttgcggatgccgcggccgccgttggacaggtcgcccaggcagaggtcgtgcagcgcctggcgcggcgcctcggccagttcgatgacgaggcgctgctcgcggaggtcggcgaaggtgccgtcgaccatctgggtgaagatctgctcggcgacgtcggcgcggatgaagtcgaagacgatgatgttctcgccgatccggttgaggatttccgggcggttgagaaccagcttgaagtagcgctcgatctcgccgtggaccttgccctgcaccgcctcgaagggctcgccggggagcacgttggcgacccgttcgccgttttccccctggcggtagatgcccaggttcgaggtgaacacgatcagcgcctcggagaagtacacgcgatcgccgcgcccggaggtgagcacgccgtcgtcgaggatctgcaggaacttgtcgaggatccgggggtgggctttctcgatctcgtcgaagagcaccacgctgaagggtttttcgcggatcgcgttggtcagttcgccgccgacgtcgtagccgacgtagccgggcggcgcgccgatcaggcgctggtcggcatgctcggcgctgaactcggacatgtcgaagcggatgtaggcgctctcgtcgccgaacagcaggctggtgacggtcttcgccagctcggtcttgccgaccccggtgggcccggcgaggaaggccacgccgcgcgggcggttgcccttgcggctggcgccgaccccggtcatcgcgcgcttgacgatgtccagcatgtgggtcaccgcgtgctgctggcccttgacccggcggcggacgatctcgtcggcctggcggatgcgctggcggtcgatcttcagccaggggtcttcggtgacgccgaccttgtagcgccgcacggcgtcggcgatgcgttccatggccaggccttccacgcgcgccaactggacgatggcgttgagatcgaggagcagcaggccttcggtgttctcgacgaaggttgcggcggcctgttgcagggcctcctcggcgacgcccgcgccgcctagcccgcggagcagcgccggggccagggcccggcgcgccggctggtcgggcttcgacaccgggatatggcgcaggcgcgggttgtccaccagcagccagtcgggcaggtcgccttccttttccaccacccacagcacgctgttgaagaacggtttgcgctgttccccggcgggacggctgcgggcctggtgggagagcaccagggcctgggtgaacaactgatgctcggcggcgctcagggcgtcgttgcgcaccgccaggcgcgaggcgaagtcgacgatcagggcgatcggctcgccgctacggttgaccaggcgttgcagggtcgcgccgagcaggtcgatgccggccggcgcggcgccgtccaccggggtcaggccgaggtcgagaagcacctgcggagtggcccccgcctcgctgcccggccggccgagcacgcggaacccggccagcggatcccaggccagcacctgggtgtagccggcgtccagcagggcgtcgcagagggtctggttgaagctctgcgcggtgaccgtacccggcaccacttcgcaggcttgcaggtcgcggatgttcccggagaggacgaattggctcttgaggggcaggaagcgcaggaggtcgcgcaaccagcgtggcttttcgaacagtgcagtccctggcatcggtagtcgctcacagcgtgtgtcgtggccacagcatattgccccgagggccatgtctccaaccctgacctcgccggaggcgacgaaaaccgctacgagttccgggtgccaggcttggcggagcgcctgctcaaccgtcgtagctccggcagccccagcggaacgcctgcgccgccgcctcgatcccgcggccgatcaccaggcgcggcgggctttcgtcgaggtcgggacgcggcggcaacggacggctgtagagcacctccagctcgccgaaaccatccagcgcggcgcgttccgccgggtgcggcgtcgcgccctggcgccgggcgaagtcttcgaggtcgccctcggcgtaggccatcaccagcacgccgctgtcgccgcgtacccgcaccgcgttcaccaggctgccgtcgatgcgcagcggggtggcgaagcggtagagcaggtcgagggtctcgccgggcgcgcgatccagcacttcgacgccctcggcgcgcaggcgctcggcggttgcgcggtcgcggccgtcggggaagtcgccgcggcagtgcagggcgtcggcgaacagtgcggtcaggttcggtgctggcggggcaggggacgtgcaggcggccggcaggagcagcgccaggccggcggcgagacggagcaggtaggggcgggtcatgtagccttccgttggcggacagtgcggtgggaggaattgccagcagacgcttccgcgatactggcggcctgcgctcagagcagtacgggcagcgcgtcttcgcccagccccgcttccctcaatcgagccctggccctggcggtcgcgcgcacggcgtcgaggtcgcagccgcgaggaatatagaccggatcgaagccttcgagcaccaggtaggtggaggcctggccgcgggcattcaggtaggcgttgaaagcctggtcggccgggcgcagaaagacatcgcaccagtacggcaagcgctgcgcgaagagcgccttggcgatctccaggtgctcttcgaacagttcgtccatgctgcctcccttctcctgctggaacaacgtcactcttcgctgcgtccgtcgccttcgcgatccctttcatagtgccgtgccagcggaaacgccggcaaccagccctcgcggcggacggtccagagttcgtaggtgggctggaaccggtcgggagcgtcgagggcgccgaggctgacctcgatctcgtcggcgctgcgcgagaacaccgaggagccgcactgcggacagaagaaacgcccggcatagtcgcgggtctcgccttctatgctcaccgcctcctcgggaaagatcgccgaagcgtggaatagcgcgccgtggtgcttgcggcagtcgaggcagtggcagagcccgacccggtaggggcggccgctcgccaccaggcggaccttgccgcagaggcagccgccggtgaatcgatccatttcgtgactcctttgcaaggcgttggggcgttcagcccttgaaggccttctctatggtggcgatatcgatcctgcccatcgtcatcatcgcctcgaaggcgcgcctggccgccgcgcggtcggggctggcgatggcttcgctgagtacgcgcggggtgatctgccaggagatgccccacttgtcacggcaccagccgcaggcgctttcctcgccgccattgtcgacgatagcgttccacaggcggtcggtctcggcctggtcgtcggtggcgacctggaaggagaacgcttcgctgtggcggaaggccgggccgccgttgagcccgaggcagggaatgcccatcacccggaactccaccgtcagcacgtcgccctccttgccggaagggtaatcgccgggcgcgcgatggacagccagcacggcgctgtcgggaaacgtctcggcgtagaaggtcgcggcctccagggcggcgctgtcgtaccagaggcagatggtgttcttgctgttcatggccaggtctccacgggcggggtcgaccccgccagtctagtcggctggcgtgcggcgacctgggcaggcgccgaacgggaggtcgcgccgcgagtgccgatctgcgctaccctatgccgcgtttcgcccagcctcgccgggctttccgggcagcgcctcggcggcgcgccctcgaccatgcaaggacaacccatggaagcggtctccgtctcgcagcatctggctgctctgttcgaatcccaccggatcgactgcgtcgtgcacggcgaatgggtggcgccagccgggcggctaccggcgatccgcgccacctggtatgcgggggagaagaccggacggctggatgtcgacgtgctgctggaggacgagcgccagttgcaggaagccttcgccggcatcggcagcggcgaggacggcttgcaggacgcgttgcgtaacttcgcctccaactctttccacgtgctgctttccgcgctctggggccaggccgaggaggaccaggtgatggtggagacctgggagatcggcgagcggcgtttcgaggtgcatatcggcaacctcggcctgcgcggcgccgagggcaaggcgccgccgctgccggccgggctgttcccgagcatcgagcgggcgatccgcgccgagccgctggacgcgcgcctgcactggttccggcatttcttctgtgccttcggcaaccagcgcacggtggaagcgctgttcgacaaccagccgtgggaggccggcatgcagaacctggccgctctcgactggcaggattcgcagggttactacagcgtgcgcaacttcctcatgctcaagccgctggcgtaggccgccgcgtcgcgaagcccgcaaggcggaaccggtcgatggcggctccattcctgtcaggtcgcccttcgacgagttcgacccctaccacacgaccagcactgcgacgatcctgcggcccctggccgacgggacgatgcagaatcgttcttcatcggcaagcggcgccatgacttccagatgaggcgcgcgcaggactgacacgccgcgttcagccgagcagggcggccacctgctcggccgtggccttggccgactgcgggttctgcccggtgaccaggcggccgtcgaccaccaccttgctggtgaacggcagcaggcttctttcgtagagcgcgccgcgtcgtttcatttcttcctcgacgttgtacggcaccttgcgggcgaccccggcgagcacttcctcgatccaggagtagccggtgaggcggcgcccggcgaccagcaggcggccatcgtccaggcgtgtgttgagcaggccgcaatagccgtggcagaccgacgagacgatgccgccgcgctggtagatctcgcgggtcaggtgctgcagcccggcgtcgtcggggaagtcccacatcacgccgtggccgccggtgaaatagatggcgtcgaacgcctccgcgtcgacctgctcgggagcggcggtgtcggccagcagcgccaggcgcgtctcgtcggccagccaggccttggcgctggcgtcggcgtggggccagccgagggcgcgcggctccagcggcgactcgccgccgcgggggctgaccaggcgttgctggtagccccgagcggcgaagatctcgtaggcatgggtcaactccgacagccacagcccggtgggctgggtcggatcggcatagtgggcgacgttggtgacgacgtgcaggatgcgcttggtcattgcgttgaccttcctcggtgagtgatcccgtcggcagccggtttcggcaggctgtccgggtgggttggcgtcactctaagattcaagtcgacttcaaggtcaagcgtcggaaagccgctgctccgccggcgtgggagaggacgcccgcgagcgggtttgccgtggacgcccgaccgtctgtggagggccttcctcgcgcaggcgctccagcacgcgctgggtgttttccgtgcactgcagaccgtccggcttgttctcgatgctttcgatggccaccagcaattgtgccttgttctgttccaggcgtcgttgcagggcctcgatctcggccaccttgcgacgcaagccttcgagcagctcgccgtgctgccaggcgccgtcgccgctcggcagcaggcgagcgatctcctccagggagaagccggcgccctgggcgccggtgaccagctccaggatccacacggtgtctgccgcatagtcgcggtagccgttggccttgcgctgcgagcggatcaggccgctggcctcgtagaagcggatgcgcgatgtcgccaggccggtgagcttggccagttcgccgattttcatgtcgcacctcgaaacgcgttgaccttcaagcctacttcaagtctagggtggtttcacggccgggcggcgaactcgcctccatcgacgggttcgccaggccgcatgggcgctaccgccggtcgcgttttcctcgtccaggcggcgcaacgcaggcggctttctactctacacaggggacggcggccgcagggtggcgccgttgcctgcatccacaccgatcgggagaagcgacatgggttacgtgacaacgaaggatggcgtcgaactcttctacaaggactgggggccgcgcgacgcccaggtgatctacttccatcatggctggccactgagttccgacgactgggatgcgcagatgctgttcttcctcgccgagggctttcgcgtagtggcccacgatcgccgtggccacggtcgctccagccaggtctgggacggccatgatatggaccactacgccgacgacgtggcggcggtggttgagcgcctcggggtgcgcggggcgatccatgtcggccattccaccggcggcggcgaggtcgtccactacatcgcccgctatcccgacgacccggtgccgaaggcggcgatcatcagcgcggtaccgccgctgatggtgaagaccgagggcaatccgggcggcctgccgaagagcgtcttcgacgatctccaggcgcagctcgcggccaatcgcgcgcagttctaccaggacattcccgccggcccgttctatggctacaaccgtcccggggcgcagccctcggaagggatcgtccgcaactggtggcggcagggcatgatgggcggcgccaaggcccactacgatgggatcgtggccttttcccagaccgacttcagcgatgacctgaagcgcatcgacatcccggtgctggtgatgcatggcgacgacgaccagatcgtgccctacgagaattccggcgtactctcggcgaagctgctgcgcaacggcacgctgaagatctatccggggttcccgcacggcatgccgaccacccaggccgaggtgatcaacgccgacctgctggccttcatccgcggctgagcgcgccgggtgccggggcgcgctcccggcacccggtcggggcccgggcggcgcggcaaaaaaagcgttgaccttgaagtcgacttcaatcttatcgtcgggccactgtcctcatgaggtaggcccatgaacctgttcgacacgctgacgcttcccaacggctcgaccattcccaatcgcctcgccaaggccgccatggaggagaacatggccgatgccgcgcaggccccctccgaacgcctgatgcgcctctaccaggcctgggccgacggcggcgccgggctgctgatcagcggtaacgtgatggtcgacagccgtgccatgaccggccccggcggggtggtcctggaaaacgacgcgcaactggagaaattccgccgctgggcgcgcatcgggcgttccgccggcgcgcagttctggttgcagatcaaccatcccggccggcagatgcaggccaatctcggccagcaggcctgggcaccctcggcggtgccgctggaactgggcgggatgtccaggcacttcgctacgccgaaggcgatggacgaggcgatgatcgccgaggtgatccagcggttcgcccgcagcgccggcctggccgagcgggccggcttcagcggggtggagatccatgccgcccacggttacctgctcagccagttcctctcgccgctgagcaaccgccgcagcgacgcctggggcggctccctggagaatcgcgcgcgcctgctgctggagatcgtccgggcggtgcgcgccgaggttgcccctggcttcgcggtggcggtgaagctgaattccgccgatttccagcgcggcggcttcagcgccgacgatgcccgcgaggtggtacggatgctcgatggcctgggcgtcgacctggtcgagctgtcgggcggcagctacgaggcgccggccatgcagggcgaagcgcgcgacgggcggaccctggcccgcgaggcctacttcgtcgagttcgcccgcgacatccgcgcggcggcgcggatgccggtaatggtcacgggcggcatccgccggcggccggtggccgagcaggtgctggccagcggggtggacatggtcggcatcggcacggcgctggcgatcgagccgaacctgccgcgcgactggcgcgccggcaaggactcggcgccgcagttgcggccgataacctggaagaacaaacccctggcatcgctggcgaacatggccgcggtgaagttccagctgcgcaagctgagccggggcagggcgaccaacccacgggtgtcgccgctgtgcgcgttgctcgcgcagcaggccggcgcgctcctgcagacccgccgttaccggcggctcatgcgttcgcgcgccgaagcctgagcaccgtcagcgcctcaggcgccgttgcggtcgagttcggccagcttgcccggcaggccgaaccaggcgtcgtggtcgtcgggcgccggcttcttgcgggtgatctgcgtccagttgggatgcgcggcgagttcgccattgagggcgatgaactgccgttgcccgagcggcacctcgtcctcggcgcgaatcgcggcgaccgggcattccggctcgcagagcgcgcagtcgatgcattcatcggggtggatgacgaggaagttggggccttcgtagaagcagtccacgggacagacttccacgcagtcggtgtgtttgcagcggatgcattcttccagcacgacgaaggtcatgatcgtcctccctggctcaggcgttcgtagcggcgggcgtcgccagccgttccaggcgcgccggcacgtacttgtgccagggcgtgccggcgaggaagtcgcgctgggtgcagtcggtcacctcgttgggcgccacgccccggcgcaccacctcgccctcggcgttgcggtagtccaggccctggccgttgggcagggagatattgcccggttgcatcatgtcgctgatctccacttccgcctcgacgtcgccgcggcgggtcaccacgcgcagcacctcgccgtcggcgcagcccagcgcctcggcgtcctgcgggctgatgcgcagggtgccgtagcgcccgcggcggtgccagccggtgtcgcgcacggcggtattgctggtgtcgctgcgccgctcgccggcggcgaggatgaacgggtaggccggatcgtggggtggcgcgctgtgggcgagcttggccagttccggcaataattcggggatgtgcaggttgatccgctgttcgggacgggcgacggcctgccagctttcggcgtaggtggtttcggcgaagaccaccccggacgggttgtcgagcatggcctggaacaggcggtcggcggccagcggcggcaacccgtcgaagccggcgcgggcagcggtcttgcggttgttcagcacgtgcagttggcagatgccccagatcgccgcggccgcttccatgccggcgggcagggtcgggccgagggtacggtagagcaggaccggcgcgtatttcatgaccttggggcgggtcgccgcggcggcgaggaaagccgccgagaatgccttgcgcccgagcttcagggccaggcgcaacggccggtagtctttctcgccgagcacgcccatggcttccagcaggcgggcgtggatctccgcttccggcagggtgccggggcgcgccgggaacagcggcgcgcgcaggtggaaggcgttgcgcgggaattccaggttgaagaaggtcgcctcggccttttcgaactggctcgccgccggcaacacatagtcggcgtggcgcgcggtctcggtcatggccacgtcgatcaccaccgacaactccagggcgcgcatggcttcgcgcatgcgctggctatcggccagcgaatgcagcgggttgccggtctccaccagcatggcgcgatagcgcttgggatggtcggtgaggatttcctctggaatcacgttgcagggaatcaggccgatgatgatcttggcattggctaccgggctgcgcttctcgacgcgtggcgcgcccttcttgcccatcgaggtatcgcccttgctggccttggacagcgagaggaagggcacgaaggcgttgctggtgccggggcgcccgtaatggccggtgagcaaccagaccaggcgttgcaggtagctgccgagggtcgagtgcaggttcatctgcatgcccaggtcttccagcgccgatacgctgctggcgctggcgatccgccgggcggtggcgcgcagcttgtcttccgccaccccgcaggtctcggcgcagtaggccaccgggatggcgttcagttcgtcgacgatgtgctcgtagccgctggtgtgttcagccagccagtcgcgcgccagcagcccgtcctggacgatgatcccgaccagcgccgccaggcaccaggcgtcggtgcccggacggatctgcaggtggaagtcggccagggcggcggtttcgctcaggcgcgggtcgatcacgatgatcgagcgcgcggggtccttggccatggcgttgagcagcacgcgggcgcgggcgaaaccatgggattgccagggattcttgccgatcaggatggccacctcgcaatgctcgaagtcgccgtgcacgccggtaccgaacatcttgccctggacccagaactcgccggtcttttcctgggccagggcgttggagcggtacttcaccccgagggccttcagcgtgctgtcgccgtaggcgccgccgaggtggttgccctgcgcgccgccgccgtagtagaggatgctttcgccgccatgtctgcgcttgatggcgaggaatttctccgccacctcgcggatcgccgtgtcccagtcgatggcttcgtagctgccatcggggcgacggcgcatcggcgtgtccaggcggtcggcgccgttctggtagtagtccatgcgctgcgatttctcgcagacgtagccctgcgaggcggggtggtcgtcatcgccgcggatcttgctgatgcggccattctcggtctgcacttccagcccgcagttgaggctgcagaggatacaggcggtcttcttccattgcggggacggcgtagtcacggtgtgttcctcgttgttgtcgttgccggcgcaacctggggcacaccccagccgtgcgggcttcgttctttcgggactgcctgacgctgtgctgcaaggacgacgcgcgggcggcacacggaaccccgtcgtatcggcctttccctctcatgctcgacgcttctacagttccgaattggaacttactacgcgggcgctgatatgggacccgtccgtagtgctggtttgtccgatcctgccaggagcgcgccgggtccatgaccttttcggccggatactaagttccaatttggaactggtcaagctccgaagcggccccctagaatgaacggaggtttttccgggagaaccccatgaaatggcaagaagtcggcgaaacgccctgttcgatggcgcgcagcctggcgatcctcggcgaccgctggacgctgctgatcctgcgcaactgctttctcggcatgcgccgcttcgatgagttccaggccagcctcggggtcacccgtcaggtactggccgaccgcctgagccggctggtggaggcgggcgcgctgaagaaggtgccttaccaggagcgaccgccgcgctacgagtaccgcctcaccgagatgggccacgacctgcatccggtgctgctggccctggccaactggggcgaccgctggctcgacgagggccgcggcgctccggtggagtacgtgcacaaggcctgtggccacaagttccggccgaccatggtctgcccggagtgcggcgagccggtggggtcgcgcgatgtgacggcggtgccggggccggggttcgcggcgatggctggcaagctcgcgcagaactgaatccgcgcgcgctctgccaagggcgggccgcgacccgctcggttcgctcagccggccttgcggaagacgaacatcagccccaccacgatcagccccatgcccagcaggctgagccagccgaggcggttgccgaagaccatgaagtccatgatcgcggtcaccgccggcaccaggtagaacaggctggtgacgttgaccaggttgccctgggcgatcagccggtagagcagcagggtcgcgcccaccgagaccacgacgcccatccatagcgcggggaccaggaagccggcgttccattcgaactcgaacggctggaagggcacgaacgccaggcacaggccgaggccggcgaggtactgcaggggcagggtgcccagcgggttctcgcggatgcccttctgcatgatcgagccgccggtgacgccggccagcgccagcagtgcgcagaggatgccggccgtggacatcccggccaggccgatgccctggtagaccaccagcaccaggccggccaggcccagcagcaggccgaacaggcgcgccggcgactgccggcgttcgaggatgacggcggtgaggatcggttgcacgccgaggatggtcgccatcatgccgggagtgacctgcagcttcagcgagaagatatagaagatcggatagatccccagcatcaccaggccggtgagcagggccttgccgcgctcacgcgcgctgcgcggcgtgcgcagcctgagcagcggggcgagcggcagcaggcaggcgagggcgatgccgaagcggaacaccaggaaggcgaacggcgaggaatgcgccaggccccatttcgaggcgatggccccgctgctccagagcaggacgaagaggctggtgctggccaggccggccagtgcggatttgttcagtgcaaacatggatctgccaccttgtagtcgggcatgccgcgggctcgggccggcggcggacggcacgcttcggcagcggatggcgctgcttgcggcgggctgtggaagggcgttggggcgctaccgcgctcgtcagggactgacgcccggcggcgggcaggcggccgaaccgggagggggaggcggcggcgaggcgactacaggaggggaaacgcagcccaggctggcgcacggctggagcgcgccgacctcgccggtggctaccggaagggcggggagcgagctgtgcgagcgctggttcatggaggctatccggtcgatgaagacaacgagagggactatagcgggccgtccgggatttgacgagcctgtgggcgagccttgcgctaaaacgccagcccggcgacaaaccgggccggcgccgggcttcacttgccggtcttcaccgtgttccaggtgcgcgtgcgcacgcggtcgatcttctgcggcatggactcgagggcgaacagcttggccatcttctcctgcggcgggtagatcgccgggtcggccttgatctcggcgtccaccagcgggtcggcggccaggttgccgttggcgtagtgcacatggttgctgatcgcggccatcacctcgggacgcagcaggtagttcatgaaggcgtagccggccttctcgtcgggcgcgtcgaccggcatcgagaccatgtcgaaccacagcggcgagccttccttcggcgtcgagtagcgcacttccacgccgttgttggcctccttggcgcgggtcgcggcctgcaggatgtcgccggagaaaccgaccaccatgcagatctcgccgttggccaggtcgctgacgtacttcgaggagtggaagtagcggatgtacgggcgcaccttcagcagcgccgcctgggcctgcttgtagtcgtcggccttctggctgtggtgtggcaggccgaggtagttgagggtgatgggcagcagctcggggccgttgtccagcaccgccaccccgcacttgctcagtttctgcatgtattcgggcttgaagaagatatcccaggagtccagcggcgcgtcgtcgccgagcaccgccttgatcttcgccgggttgtagccgatgccggtggtgccccagaggtaggggaagccgtactggttgcccggatcgttgacctccagggccttgagcagcaccgggttgaggttcttccagttgggcagctgggacttgtccagcttcttcagggcgccggcctggatctgcttggccatgaagtggttcgacgggaataccacgtcgtagccggattggccggtcatcagcttgccgtcgagggtctcgttgctgtcgtagacgtcgtaggtggcctggatgccggtttccttggcgaagttcgccacggtttcgggagcgatgtattcggaccagttgtagatcttcaggttgtccgcggcgagggttgcgccgctgccgcaagcgagggcgaggagggtgagggaagcgatgcgggtcttcattgttgtaggtgtcctgtcggctgacgacagcgtcggcgacggactggttcgccgccggcgctcagggggcgccggcaacgctggccggcacccgggttttatcccgcgttgccggaagcgaggaaaggggcggcttttacctgcgggcccgcagacaggcgccggcaccgcagcggggcgtcgctccgcccgcctgcctcaactcagggcgaccttgaccccgagggcgatcagcaggccgccgagcagcttgtccaccaccccctgggccctggccaggccgcggcgcaccaccgcgctctggatcagcaccaccagcagcggccaccagagtgcggcgaggccgacgatgatgccggcgtaccagagcttctcggcgaagctggagtccaggctcagcacctgggtgaacacggcgaggaagaacagcgtggccttggggttgagcaggttgcacaggtagccctggaggaacgcgctccagtggccgacgcgctgcacgccgccgaccgccaggtcgagcgtgccgccgccgcgcgagcgcagggcctggatgccgatccagatcaggtagaccgcgccggtgtacttcagcgcgttgaacagccacggcgtggtggtgatcagcaccgccaggccggcgacgcagtaggccatgtgggtggccacgccgaggatcacccccagcgaggtcatcatcgccgccgagcgctggtagcgcgccgcgttgcggatgatcaggaagaagtccgggccgggcgagagcatgcccagggtggcgagggtggctacgaagagcgaggtttccagcatgattcgatacgcctggcgcaaggcggcgccggttcgctgcggcgccgcgggtcggtggttactgggtcagttcctgttcgctgaacaggccgtcgaagagcatgctcgaaagatagcgctcgccggaatcggggaggatcaccacgatggtcttgccctgcatgttcggctcctcggccaggcgcaccgcggcggccatcgccgcgccggaggagatgccgcagaggatgccttcttcctgcatcaggcgcagcgccatgttcttcgcttcgtcgtcgccgatcttctcgacccggtcgaccagcgacaggtcgaggttcttcggcacgaagccggcgccgatgccctggatcttgtgcggggcgggcttgacctcctcgccggcgagggtctggctgatcaccggcgaggtcaccggctccaccgccacggcgaggatcggcttgccccgggtgttcttgatgtagcgcgagacgccggtgagggtgccgccggtgccgaccccggaaaccagcacgtccaccgcgccctcggtatcgttccagatctccgggccggtggtcttctcatggatcgccgggttggccgggttgtcgaactgctgcggcatgaagtacttcccgggatcccccgcgaccagttcctcggccttctggatcgcacccttcatgcccttcgccggttcggtcaggaccagctccgcgcccagcgccttgagcaccttgcgtcgctccaggctcatcgacgccggcatggtcaggatcagtttgtagccgcgtgcggcggcgacgaaggcgaggccgatgccggtgttgccggaggtcggctcgaccagggtcatgccggacttcagtctgccgctggcttcggcatcccagatcatgttcgcgccgatccggcacttcaccgaatagccggggttgcgcccttcgatcttggccaggatggtgacgccgcgcggggcgatgcggttgatctggaccagcggcgtgttgccgatggactgcgcgttgtctgcgaagatgcggctcatgatggtgtccttgtcgcatggagaaagatcaatcagcctattccgcccccgcccgcgcgtccagacgcgttcgaaccagcggcgcgccgcgcgtgtccactgtccaggagggccgtaccgatgaagaaacgctatgccattcccctgggcagcctggcggcgctgcttctgttgttgctggcgctgcacctggcgctgccgtacctggtgcgcgactacctgaacggcaagctggccgacatgggcgactaccgtgggcacatcgccgacgtcgacctggcgctctggcgcggcgcgtatcggatcgacgggctgagcatcgtcaaggacaacggcaaggtgccggtgccgttcctcgacgcgccgagcatcgacctgtcggtgagctggcaggcgctctgggatgatcacgcagtagtggcgcgggtggtcttcgagcgtccgcagctcaacttcgtcgatgccggcggcgaccgcgacgcctcgcagaccggtgccggcaccgactggcgcgagcaactggacaagctgctgccgatcaccctcaacgaggtgcgggtggtggacggcaccctgcgtttccgcaacttcacttcgaagccgccggtgaacctgcacgcctcggcgctcaacgccagcatctataacctgaccaacgtggccgacgcccggggcgagcggccggcgcgtctcgaaggcacggcgcggatactcggccaggcgccgctggaagtggcggcgcatttcgacccgctgagcgacttcgaggacttcgacctgcgcctgcgggtcacccgcgtcgagctgaagcggctcaacgacttcgccagcgcctatggcaagttcgacttcaatgccggcaccggcgacctggtgctggaggcccaggctaagcgcggccagctggatggctacatcaagccgctgctgcgcgacgtggacgtgttcaactggcggcaggacgtggaggatggcgacaagaacctgttccgctcggtgtgggaggcgctggtcggcggtggcgagactgtgctgaagaaccagcgcaaagaccagttcgcaacccgtgtgaacctgagcggtaatatccaccagcgggacgtcagcgcgttccaggcgttcctcgggattctccgcaacgcgttcgtcgaggcgttcaacgctcgtttcgagcgttccccggcgacgcgcgacgacgacggctgaagacgcgggcggaacggcgggtcgcgaggtggccgggcattcagtgactgaatgacccgtctgcgttcacagtgcgcttgtccccgcgttatagtcgggttttcaaacaatactgaactgcccggttttccagccagggcgttaccgttcgaggatttcctgatgaagttcgaaggcacccagtcctacgtcgccaccgacgacctcaagctcgcggtcaacgccgccatcaccctgcagcggccgctgctggtgaagggcgaaccgggcaccggcaagaccatgctcgccgagcagttggccgagtccttcggcgccaagctgatcacctggcacatcaagtccaccaccaaggcccaccagggcctctacgagtacgatgcggtaagccgcctgcgcgattcgcagctgggcgtggacaaggttcacgacgtgcgcaactacatcaagaagggcaagctctgggaggccttcgaggcccaggagagggtgatcctgctgatcgacgagatcgacaaggccgacatcgagttccccaacgacctgctgcaggaactcgacaagatggagttctacgtctacgagaccaacgaaaccatcaaggcgaagcagcgcccgatcatcatcatcacctcgaacaacgagaaggaactgcccgacgccttcctgcgccgctgcttcttccattacatcgccttccccgaccgcgagacgttgcagaagatcgtcgacgtgcactacccgaacatcaagcagtcgctggtcagcgaggcgctggacatcttcttcgacgtgcgcaaggtgcccggcctgaaaaagaaaccttcgacttccgagctggtcgactggctgaagctgctgatggccgacgagatcggcgaagcggtgctgcgcgaacgcgacccgaccaaggcgatcccgccgctggccggcgccctggtgaagaacgagcaggacgtgcagcttctcgagcgcctggcgttcatgagccgccgcgccagccgctgagtgcgtcggccctttccgaggaaagggctgcggggcggcacgccagacagcggaggaacatcccatgctcagcggaagttgcctgtgcggcgcggtaggctatgaaatcgacgcgcccatcgagtcggccagtcattgtcattgcagccagtgccgcaaggcccacggcgcggcgttcgccacctacggcaaggtgcgccgcgaggcgttccgctatgtcgccggagcggacgcggtggccgaataccactcgtcgccaggcgtcacccgtaccttctgccgccactgcggatcgaacctgcagtggcttggcggcaacgaggacccgacgtacacctctattgccctcggcaccctcgactcgccgctgccatcggtagcgcagcggcacatctacgtgggttcgaaagccgactggtacgtcatcgccgacgacctgccgcaggaacaccaatactgaccggcgctcgcgcgccgggatcaacggacaacagacgaggtcgcagccatgctgctcaacctgttcaacgaaatgcgcgcagccaaggtgccggtgtcggtgcgcgagctgctcgacctgatcgatgccctgaagcaccgcgtggtgttcgccgacatggacgagttctactacctggcgcgcaccatcatggtcaaggacgagcgccacttcgacaagttcgaccgggccttcggcgcctacttcaagggcctggagaagctcgacgaccacctcaaggcgctgatccccgaggaatggctgcgcaaggagttcgagcgcctgctgaccgacgaggaaaaggcgcagatccagtccctcggcggcctggacaagctgatcgaggagttcaagaaacgcctcgaggaacagaaggagcgccatgccggcggtaacaagtggatcggtaccggcggtaccagtccgttcggctccggcggtttcaacccggagggcatccgcgtcggcgacgccggcaagcgccagggcaaggcggccaaggtctgggaccagcgcgaatacaagaacctcgacgaccaggtcgaactgggtacgcgcaacatcaagatcgccctgcggcgcctgcgcaagttcgcccgtgagggcgcggcggaggagctggacatcgacggcaccatcgaccacaccgcgaaggacgccgggctgctcaacatccagatgcgcccggagcggcgcaacacggtgaagctgttgctgctgctggacatcggcggctcgatggacgcccacgtcaaggtctgcgaggagctgttctcggcctgcaagaccgagttcaagcacctggagtatttctacttccacaacttcatctacgagtcggtgtggaagaacaacctgcgccgcagcagcgaacgcaccgccaccttcgacctgctgcacaagtacggtccggactacaaggtggtgttcgtcggcgacgcggcgatggcgccctacgaaatcacccaggccggcggcagcgtcgagcactggaacgaggaagccggttacgtctggatgcagcgcttcatggagaagtacaagaagctcatctggatcaacccctatccgaaggacacctggaactacacggcgtccaccggcctggtccgcgaactggtcaaggaacagatgtatccgttgaccctgagcggcctggaggagggcatgcgcttcctctcgcgcggttgagccaactgcctgcgggaccagcgacaggcgcggcggcacgcaacttgcctaccctgtgtatcccgtccgcgcggtaacagcgcggcgcggccaccggtaacgatgggcacgccatgatcgactcgaccttctcccgcgccacctggctcaactcgctgcacatgtcgaccctcactctctcgctgctggagaaggaagggttcgcccgcgagcaactgctcgaaggcagtggcatcacccccgccgacctgctcgacctgcggcgcctgatcagcccctggcaggagcagcaggtgttcgccaacgcctgccggctcagcgacgagccggccctcggcctgcgcctgggactgcgcacgcggatttccgcctacggcctgctcggctacgcgctgctctccgcgccgaccctcggcgaggcgctgcgcatcggcctcagctatccggtcttgctcggcacctacttccacctgtcgctggaagtcgccgacggccgcgcctggctggtggccaccggctacggcgaggacgaggcgctgcggccattcaacaccgagctttgcctgggctcgctgaaggtcacctgcgccgacctgctcggccagccgctgcccttgctggaagcggccttcgactatgccggcgacgaggcgatggcgcgggcctacgccgagggtttcgcctgcgagttgcacttcgaacgcgagcgcagcgccatcggcttcgccgccgaatggctggagcgcccgttgccgctggccgacccggtgactcaccgggagatgctggaacagtgccggcggcagaacatcgacctggccgctcgtcgtgcctggctggacaaggtccgggcgatcctcgccgagcgcttgcaggacccgcccggcctggaggaactggccaggcgcctgaactgttcgtcgcgcagcctgcgccggcaccttcagcagcagcgcaccagctaccagcaattgctcgacgagttgcgcttcgcccgcgccaaggagttgttgcagagcggcgacatgccgatctaccggatcgccgaggaactcggcttcagcgagaccgccagcctgcgccatgccttccagcgctggagcggccagccgccgagccatttccgcgcctgagcgctcgctcaggcggaggggctggtgtcggcgtggcgccgtcgccgttcgtccgccacctcactcagggattttgccgcgccgtcgccaatccaggccatgaaggcacgatcgaagcggaagtcggcgccgcacagcccgacgaggaagcgccgtacgtcctgggcgttgcgctagtcgcggcacactgcggtgtcgcgggtgatggtgtcgccgtgccagccgaagaccatctgtcgtttctctgcgcgcgctggagcgggcaggccaacgatggcctgcccacgggccgtcaggatgccggctcttcgatcagccggtcatagggcggcaggccgctgtattggcccagggcttgctcgtaggcgttcttcaggtcgtcggcggcgaggtcgtagccgaccagcaactgttcgagttcagcggcgttctgcgggtcgtcgttctgcaactgcgcgtcgagttcgcgggtgcgcgcggcgacgcactggatcgccaccatcagggtctggggtttcaggttcatggttcactcctagagcccgcgggctttttcccattggcggcggatggcgttgcgcacgaagttgtccagttggcccatgaggacctcccggtacatcggcttggccggcatgatggtgtagtgggtggcttgcaggcgcttgttgtagctgtcctgcttcaccttaaggtccggcgggatgtcggtgccgtcgggtatcacgaagtcgccgtcggcgcggcgcagcacgccggcgcggtcgaacaccgaggtgccgccggtgtccggggcgtagaggccgtcgcggccggcgacgatgtccggcgcgcgggcggggacgccaggggtgttggggctgtcgaaggtcggatgcagcagcggggcgacttccgcagcctcggcgagttccttgtcgggacgcaggtagcgaccgacgtcgccgtcgtagttggccttgaataccgcccggtagagggtgaggctggttttctcgtagtcgtaggacatgcgtggacttccctgtgggttgcgttcgcggcgccgcgggtgcgcggcatcgctaccggccaccgtccttgtggcgccatcggcgagcaggataacagccgtgggcggatccgccaggggcaggcgacgaccgtcgcccgggaggctcaaggcctggccgcgccgtgcaggtaatggcggatgcgcacctccacgccggcgctctggaagcgccgggcggcggcctcgacccgcaactcgccgcgggtcacccgctggtggtggcgcaggtgctccagccaggattcgtcgatgaagaactccagccacaggcgacggttgccgctgtcctggaccagcccccaggacaccgcgccgttgcgccgacgcatggcgcgcacctcgaccatcgccgcctggaatgccgcggcgtcctgtgggtcgatgtcgtactcgagggtgaccatcaccgggccgcgttcctggtccacctcttcgtcgaccagtggtgccggccagtgcagcgacggcgcgaggtcctcggcctcggtgaccggcagccggcagcgcagcgacgcgaacaggccgagcagcagcgcggcgctggcgcagagcagggcgaaggtgatcgacaggtggctggcgaccagaccccacagggcgccgccggcggccatgctgccgaagaacaccaggatgtagaccgccagcgcgcgggcgcggacccaggccggcacggaggtctgcgcggcgacctgcaggctggagagcacggcgatccatgccgcgccgctgagcagcatcaccggcaccagcaaatagaggttgcgcagcagcgccagggccagcagcaccagtgcgtagagcacgctggagagcagcatcaggcggtcgctgccgaggcgttcgcgcaggcgcggcaggaacgcggcgccgagcaccgcgccgacgccgacgctgcccagcagcaggccgaagtccatggcgttgccatgcagttcgccgcgcacgatcaggggcagcagcgacatgccggcgctggcgccgaggaagaacgccaccgcacgcaccagcaccgattgcagtggcctcgagctgcggctgtagcgccagccggcgcgcagggcgccgaacaggcgttccgccggcagcaccgagggcacggcctcgcgtttccaggccagcagcacggcgatcaccgcgaagaaggagagggcgttgagggcgaaggtcagccaggggccgaccaggctcaccagcaccccggcgatggccggtccgaccgcccgcgccaggttgaccccgacactggacagcgccaccgccgccggcagttcgtccttgcccaccagttccggagtggtggcgctccaggccggcatcatcagcgcggtgccgatgcccatgcacagggtcaggccgagcagcagccagacgctggtcaactggagcagggtgaggctggccagcagggtggccaccaaggccatccacaattgcacgccgagcaggtagcggcgcttgtcgacgatatcggcgagggcgccggccggcagggccaggaagaacatcggcagcgatccggcgacctgcaccagggccacgttcagcgggctggcggagagcgaggtcatcagccagccggcgcccacctcgtgcatccaggtgccgatgttcgaggcgatgctggccagccatagccagcggaaggtggcttggcgcaggggactccagggtgaggcggcgggtgcggtcatggtcagagcgagcctttgagtgggtattcgacgatcaggtagaggcggtcgatgtcgtcgccggcctgggccgcgttggcccggtggctgaggtgcgagacgttcagcgagaggtccttgaacgggcccgaggcgaacaggtagcgcaggtcgaggtcgcgctcccagtgcttgccgccgctgccctgcaagggccggtagcggccatcggcgcccagcgggttgtaggcgccgccggccggcgcatggctgccgtcgatggcgcggccgctgacgtaacgcgccatgaagctcagccccggcaggccgaacggggccaggtcgaggtcgtagcgggcctgccaggagcgttcgccgggaccgttgaaatcggcgtacttgatcgagttggcgaggtagatggagtcacctccgacgaagtcgaacggcgtatccccatggacacgctggtaggccagggagaaaccctgcgcgccgacgcggtacttcagttgcaggctgtaggccagggtgtcgatcgcgccggcccggctgcggccctggtcgcgcgtgcgatagaggttgccatccaggctgaacgcggcacgttgcaggttcatgttgagatagacctggcgccagacgttgtccagttgcgcggcgaacagcgagccgctcaggttgtcgctggccgccaggctggcgccggcgaagccgatggcgctgccggcggtgctcgcgccgtagccgtcgaagtcgccatggccggagctggaggcctgttccttgaaggcggtgaagcgcccggcctggatccgcacgcggtcgaggtcgtcgctctgcaggaagaagcccctggcgtactggggttgcaggcgcttgtcgctggtatcgaagaccggggtctcgacggtcatctcgccgaccttgagcaggctctcgccgagccgcagcttgagtgcggcgccggcgtcggaatactcgctggcgttatcgccggatgagtccagcggcaacaggccggtgccggcatggccacgtccgccgtcgagcttgaagccggcgaagccgtggagatcgaggccgaaaccgacgcggccgggagtataggccgactccaggtcggcgatcaggccgtgtgcccattccttgcggtagccgcgcccggcgtccgcgcggcgatagtcgttgtagaggaagtagttgcggttgagcaggcgccactccaggtagtcgggtgccttggcttcctctgtcgcggcgtggcacggcgaggtgccgcccagcgccaggaaaagggccaggcggccgaccggtcgaacgcggatcatcgggaaaactccgggcgaggcgggccgcgaagggcccgcccgggtacgtcagaaagcgaagcaggaacagccgaatgcgccccagaaaccctggaagtcgctcaccggtacgttggagtggcgcgcgcggttgtgctcgtgggcgtgtaccgcgcaggcaccgacgcactggtggacctgggcggtcagcggcgcgccttgccgccagtggccgggtaccttggccaccggcgaccagtccggcagcaccggcggcgccggcggaccgagcttgtcgaactcggcggcggcatagacgatcttgccgtcgaccaccgtgagcaccgactcgatccacttgatggcctcttcctcgacgccgaagaagtccgccgacagcgccgccaggtcggcgagctggccaaccttgatctgtcctttcttgccctgctcgctggagaaccaggcgctgccgtgggtgaacagctgcaacgcggtttcccgcggcaggccctgcggatacagggccatgccgccgacggtgcggccgctgaccagccagtacagcgaggtccaggggttgtagctggagacccgggtggcgtcggtgccggcacccaccggcacgccctcggcgagcatgcgctggatcggcggcgtggcctcggcggccttggcaccgtagcggtcgacgaagtactcgccctggaaggccatgcggtcctggatcgcgatgccgccgccgagtgcccgtacccgctcgatgttgcgcggggtgatggtctcggcgtggtcgaagaaccagggcaggccgttgaacggaatgtcgcggtcgaccttctcgaacacgtcgagcatccgcgagatcgattcgtcgtaggtggcgtgcaggcggaacggccagcgctgctccaccaggtggcggaccaccggctccagctcctgctccatggtctgcggcaggtccgggcgcggttcgaggaagtcctcgaagtcggcggcggagaacaccagcatctcgccggcgccgttgtggcggaagaaatcgctgccctggccgtacttgacgctgccggtccagttcttgaagtcggcgagttcttccttcggtttctgggtgaacaggttgtaggcgatgcgtacggtgagctggccctggtcggccagttcgcgaatcacctggtagtcgtccgggtagttctggaagccgccgccggcgtcgatcgcgctggtaaggccgaggcggttgagttcgcgcatgaactggcgggtggagttgacctggtattccagcggcagcttcggtcccttggccagggtggcgtagagaatcatcgcgttgggccgggcgatcagcatgccggtgggttcgccgctgctgtcgcggacgatctcgccgccgggcgggttgggcgtgtccttggtgtagccgaccacgcgcagggcggcgcggttgagcagggcgcgatcgtacaggtggaggacgaacaccggggtgtccggcgcggccttgttcaattcctccagggtcggcatgcgcttctcggcgaactggaactcgttccagccgccgaccacccgcacccactgggggctgggcgtgcgttcggcctggttcttgagcatgcgcaaggcgtcggccagggagggcacgccttcccagcgcagctccaggttgtagttgaggccaccgcggatcaggtgcaggtgcgagtcgttgagaccggggatcacggtgcgcttctgcaggtcgatcacctgggtggcgctgccgcgatggagcatcgcctcggcgtcgttgccgacggcaaggaacttgccgtccttgatcgccacggcggtggcggtggggttgtcgcggtccacggtgtggaaacggccgttgtgcaggatcaggtcggcggtcatggaacctcctgggttgcttgcgggagaaaggctggcggcgttggcgaagggcagggcggaccacaggactccggcggcgcccagcaccgaactggtagtgaggaaatggcggcggtccttgctcggcggatcgtggctcatggcgtgctcctggcagcggggcggaatcggtcagcgagggcggcggcgagagaggccaccggacaggataggtgcggcgggaaacgtacgggacgaaagagcggttttcccgaatgacgcatcctcctgcaagcgcaacttgctggtggtcgatagcaagtaaggcgcgagacatgtcctgaacttcatgggggctttttcttatagggcggactgtcgattctgctagctggtaatccttcttttattgtctctgtgtgcgctttttgtatggatgtgtcgaatattttgaatatcgccgttcaactttatccggggccgcagttcagtgatttattttctcgaaaagtttgttttttccaatatccatgcttcatagtctggccggccacgggaaattatctgttggcccgcgtgctgttgtgcgcaacagctggaattcatcgttcgttgtcaggaaacaatcatgagccactatctcgaagttctaactccgcagaacagccagatcatcttcatcgaccagcagccacagatggcattcggcgtacagtccatcgatcgccagacgctgaagaacaacgtagtgggcctggccaaggcggcgaaggtattcgacatcccggtcaccatcaccacggtggaaaccgacagcttctccggcccgacctatccggagctgctggcggtgttccccgagcagaagatcctcgaacgcacctcgatgaactcctgggacgaccagaacgtgcgcgactcgctggccgccgcgggccgcaagaaggtcgtggtcgccgggctgtggacggaggtctgcaacaccaccttcgccctctgcgccatgctcgagggcggctacgagatctacatggtggccgatgcctcgggcggcacctccagcgacgcccacaagtacgccatggaccgcatggtccaggccggcgtggtaccggtgacctggcagcaggtcctgctggaatggcagcgcgactgggcccgccgggatacctacgacgccgtgatggccatcgccaaggagcattccggggcctacggcatgggcgtggactacgcctacaccatggtgcacaaggcgcccgagcgggtgacccacggcgaacgcatcggcccgaatccggccaagtgaatgccggccgtgccgctccggtccgccgggcggcacggccgcgaaggagaacgaagatgaagctctacgtattgtcgctgggcgccggactgttggtggggatcgtctacagcctgctgcaggtgcgttcgccggctccgccgctggtggcgctggtggggttgctcggcatcctgctcggcgagcaggtcatcccggtcggcaagcaattgctcggcggttgcgcgttcgcctcggcctgcgacaaggcgggttcggtcggccatgtgctggggcaactaccgggtcggcatcgcctcgaccaggccgctggcccgtcggaaaaggaaaagggttgagcgttatatcatcgagtaacagcgcagtaatctggtagttatcttcgtcggttagatttccccggaacggctccctcggattaatctctgggggagctttcgtgcgtcgtttttcgcgtcgagagaaaagtgtcacgagatcatcaggcgcatggaatcagggggagtcatgactgttgccatagacagaacaaagggcgaccaatccacgccagggaacatcataaggggagaagggtacgccttgattcgcaatagtgaggcgactcccgatccggacaaggtgatccatattccttgtgccgattcgttttccgtcatcgtgcagttgcgcgatttcaattcccatcgtctctggaatggaaacaaactggttttcgatggcggacatccacggaaaagtatctccatcgcctatcttggcgatgaaataaagtgccagcaccggacaacttacgacaatgtccgcttcatgttgccgcgcgcttcgataaaggagtttctctacgaagaagggcaacgcgcgtccgccgagccggagcggatcatcggtgtcgacgatccggtggtctatcacctggcgctggcgctgctgcccagcttcgccagggcgggcgagcgcaacgaactgttcatcgagcaggtcatgctggcgctgttgacccacgttcaggatcgcttcgcttcgacccaggtcccggtctgcaccggcaagggcctggcgccctggcaattgcgcagggccaaggagctgatcgccgggcatctggccgagggcgtgtcggtggcgcgcctggccgaggagtgcgggctctcgcgcagctatttcaccaaggccttcaagtgcagcaccggtttttcgccccacgaatggctgatgcgcatgcgcgtcgaccgggccaaggagctgatgctgggcagcgacgaaccgctttcgcagatcggcgtcgcctgcggcttttccgaccagccgcatttctcgcggatctttctccggctggccggcgcctcgccctcgacctggcgtcgggtcaagcggcagcgcaccgacgcagcgctgtgaaccgcgaccgtgcgtgacggacggtacggaagccgccggatgctcggctagaatgccctggcttcggcggtcgccatcggccgcccacttcgcaacggaacagggaatcgcagatgaaagcagtacgccagggtcgcggcgtaacggggttgctcatgctcctggcgctggccgggtgcagttcgcggtcggcggagccgccgcccaaccccgacgaagtacgggcgaagatcgtccgcctgatgccggccacggtgcgcgatcgccaagggtgggccagcgatatctacgcggccttttccgcccagcagatctaccccagcgacgagaatctctgtgcggtgctggcggtgaccgagcaggagtccacctaccaggtcgacccgccggtggccggcctgggcaggattgccacccgcgaggtcgagcgtcgtgccggcaagctgcacgtgccggcgttcctggtcagctcagcgctgaatatcaagtcgcccgatggccgcacctacagccagcgcctggccgcggcgcgcacggagaaggaactgagcgagacattcgacgatttcatcgccatcgtgcccatgggcggcaagctgttcggcggcttcaacccggtacacaccggcgggccgatgcaggtcagcatcgctttcgccgagcagcacgcggacggctatccctatccgctggacggcagcatccgccgcgaggtgttcagccggcgcggcggcatgtatttcggcatcgcccacctgcttggctatccggcggactacccggcgccgctgtaccgcttcgccgacttcaacgccggctggtatgccagtcgcaacgccgcgttccagagcgcggtgagtcgcgtctcggggattccgctggcgctggatggcgatctgatccgctacggcacgcgcacgccgggctccaccgaactggccgtgcgcagcctcggcaagcgcctggacatgagcgacgcggcgatccgccgggcgctggagcagggcgacagcccggagttcgccgacagcgcgctgtaccgcaaggtcttcgccctggccgaaagcgccaccggcaagacattgccccgcgccgtgctgccggggatcgccctggagagcccgaagatcacccgcaagctgaccaccgcctggttcgccaagcgcgtcgacgaacgctaccagcgctgcatggcgcgcgtgcggaaacgctgagtccatcgtcgcgcgggtcgaacctggcgccgccgcgggagtctgccgtcctgtcagccaagctcatggagaagcagcgtatgaagacccgatacagcgccgaggcaccggcgcgcgacgaactggaccggctcgccggtccgacgctggtggagttcggtaccgactggtgcggccattgccaggccgcccagccgctgctggcggaagtattcagcgactacccggaggtcggccacctgaaggtcgaggacggtcccgggcgccgcctggggcgctcgttccaggtcaagctgtggccgaccttcgtctttcttcgcgacggccgggaggtggcgcgggtggtccgccccggcagcgccagcgtgctggaagaagcgttcgagagcctggtcggcgagggctgaggacccggcccgcgggccgggcggcgttcaggccggcatcgcgtgatccacctgttcgcggatctcctggtagcgcagttccatcagcttgcgctgctcgcgccgggccagggcctgggcgtagcggcgtttctcgatcgcggtctccggttccagcggacgcaccgccaccggccggcgctggtcgtccatcgccaccatggtgaagaagcaactgttggtatggcgcacggtgcgctcgtggatgttctcggtcatcaccttcaccccgacctccatcgaagtgcgcccggtgtagttcaccgaggcgaggaaggtcaccagttcgccgacatggatcggctcgcggaagatcacctgatccaccgacagggtcaccacgtagcgtccggcgtagcgcttggcgcaggcaaaggccacttcgtcgaggagcttgagcagcgcgccgccgtggacgttgccggagaagttcgccttgtcgggggtcatgagcacgctcatggtcagttggtagctgccaggttccatcgttcacctatcacgcaagttggtcacgggccattgcagtgggccggcggccgctctgcggcggcctctggcgatagggtagggagaaacgccggcgcgattagcaccgcagtcgacaatggtgttttccgcgaaacgggcttgcggcgccgctccgtatgcgccaagggctagtcgcgggagccgccgcgtccttcccggctggcatccatccagcgcagcacttcttcgccgaactccggtggcgcgatacgccccacccggcgtaccaggtcgaggatggtctgctgggccagcgcttcttccatgcgcttctgcgcggtgagcatcaccgcgtggatcgagcaggtgttgcgggtcgcccaggaaggcgggttgccttcgaagatcgcgcagcgctcgcggacctcgcggcattcgaagatcgatttgtcgccgtcgatggcgcggaccacgtcgagcacgctgatttcgttggccggccgtgccaggcggaagccaccgcgcacgccttcggtggcagccaccaggccggccttggccaggcgggtgaagaccttggccagcagttccggcggcacgccctgcaactcggcgagggtacgtacgctggactcgcggctgtcgcctttctcgtcggcgaggaacaacaggcagtggatgccgtattcgacgccggcgctatagagagccatcactaactccgatagaaatattcgcaatattctgcgcggttttcaggtcgctcacaaggacaggtcgttcgctgtcttccgcctcgaagcgctctatctccgatccttttcgtatgttttcgacgtcttttccctctctttcacggcgaggggcgattgcctgtcggaacgcttttcggggattgatcttcttaactacgacaaatatagtcgtagttacggagaggcttttctccggatatcccgtcctttccctccaggagcccccaatgaaacaacgtatcctgatcgtcggtgccggattcgccggcatgtggagcgcgctgagcgcagtgcgccagctcgaccgccagggccgcgacgacgtcgaggtcgcggtgctcgcgccgcagcccgagctgcgcatccgcccgcgtttctacgagcctgacgtgcagcgcatggcggcgccgctgggcgaattgttcgccgcggtcggcgtgcgtttcgtgcagggcagcgcgcagcgcatcgacgtggccggcaagtgggtggagtaccgcgatgccgagggcacgctggcgcaactggactacgaccgcctggtgctggcggccggcagcggcgtgtggcgtccggcgagtgtcgtcggcatcgacgctgccttcgatgtcgaccagttggaagacgccctgcgcctagaggcacacctgcatgccctgcgcgacttgccggattcaccggcacgcaacaccgtggtggtcgccggcggcggcttcaccggcatcgagaccgccaccgagatgccggcgcgcctgcgggcgatcctcggcgagaaagcggcgctgcgagtgatcgtggtcgaccgcggcgccgccatcggcgcatcgatgggcgcggacctgagcggcttgatcgccgaggcctcggcggaactgggcgtggagtggtgcctggggcgttcggtggcggcggtggatgccgagggcgtgacgctcgacgacggccagcggatcgaggcgaagaccgtggtctggaccgtgggcgtgcgggccagcaccctgaccgggcagattccgggcgagcgcgatgcccagggtcgcctgcatgtcgaccgcaacctcaaggtgctcggtctcgacgatgtctacgccaccggcgacgtggcccgcgcggctaccgacgacctcggcaaccatgccctgatgacctgccagcacgccatcgccctgggtcgctcggccggcaataacgtggccgccgacctgctcggcgtcgagccgattccctacagccaggtgaaatacgtgacctgtctcgatctcggcggctggggcgcggtgttcaccgagggctgggaccgccaggtacggttcgtgcgcgaggagggcaagaagatcaagaccgagatcaatggcgtgtggatctacccgccggcggcggaccgcgccgtggcgctggcggcggccgacccgctgattccggtggtagcgtagggcgattttccctcaccccaaccctctcccgcaggcgggagaggatgccgtgcagcgtagagggatgcagcggcgcgcggatgcctggcttccggtagggcgaataaccgcgaagcggttatccgccgttgcctcggttctcttgggagcgtgcgtcttcagcgctggcgttccaccgccggacgggcgagcagaaggcgcaacgaggcccccagcgtttcgccatgacccaggccgtcgagcggctggaagtccagcgtgagcccggcaacccggcgcaggtcatctaccagccgcgccatcgcctggcccggctcggctttcagcgagccgcgcgggctggccggttcggcgctgccgcgccagagcaggagttccgcgcgctttccgcgcaggcgctgttcgagccccgctcgttcgccgaggatcgctccgtcgcgccaccacagcgacgggctggccgcggcgtagcgggcgaactcgccgggacgggtgaacagtgcgtggagcaccagcaagccgccgtaggagtgtccccagagggtttgtcgcgcagtgtccaggggcgcctgcgccgccacggccgggcgcatgccgtcgcgcagcaggtcgaggaaggcgtcggcgccaccgctgggcaggccgttgagcgggtcgcgctgatcggcctggccgggactcgcgggggtgtagtcgaaggtacgcccggcgcggtcgatgcgcagcggcgtgcggtagccgatggcgaccagcagcggtgcgtcgccgtcggccaggcgtctcagggttgactcgtcgagggcgccgacggcggcgttgccgtcgagcatccagaccaccgggtagccggcggcgggcggtgcctgcagcggtcggccgagccacagccggtaatgccgctggccatcgacggagtccaggtccacggcgctgaagcgatagggcaggtcctggcgttgcagcaggctgcggtccatggtcgcctcggggtccggttgcgccagcggcgcgccgccgggcagggccgccgccagggcgaggcccagggcggcgacgagcagggaggttctcatcaggctttctcgttatggctcagaacgacgcggtcaggctggtatagaaggtccgtccgggctcgttgtaggtcgccgcgccggccccgtcgatgccgaccacgccctgggcattgccggcgcggaacaggcgcttgtcgaacaggttgtcgacgccggcgccgaggctcaggttcttgctcaaccgataggtgccgccgaggccggcgatggcgtagggcgagagctggtcgttggcgctgccggtgacacggtcgccgtgatagtcgtatttcttcggcttctgcttgccgtaccaggtgaccgtggcttgcagcgagaggtcgtcggtggcctgccagtcgagcatcgagttgagggtgtagcgcggcgtcaccgagagcacgtcgccggtttccttgttcttcgattgcagcatgtaggtgaagttgttgctccacttcaggccgtcggccaggggcagggtcagggtgccttcgaggccctcgaccaccgccttgggcacgttctcccactggtagatcgccgcgttggcgtagtcgcccttgccgccgctggcgtggtcgaccggtgacaggccggattcgatcttgttcttgtagtcgttgcggaagtaggtcagccccgctaccaggccgtcgtggctgtactcgatgcccagttccttgttcacgctggtctcggccttgaggccgtcgttgccgcgcaggtagcaactggtgctttgcccgtagcaaccctggccacggctgtagagcaggtagtcggggttcagctggtacaggttgggggccttgtaggcgcgggcgataccggccttcagggtgacccgctcggtgagcgcgtgggacaggttcagcgatgggctccagttgtcgccgacgatgtcgtggtggtcccagcgcaggcctggggtgagcatggtgccgggcatcagctcgatgttgtcctcggcgaacagcgagaagatccgcgccgaggaactgctgctgcggttctttccggcgagaccggggatcgagccgccttcctcggtgttctgggtgttggagctggggtcgtcgagcttctgctcggtccactcgctgccgagggtcagggtctgctcgtagctcaggtgcagcggcaggttgacctcgccgtgggcggtcaggtcgcgcagggtggcggtgtagaagccggcgttgttggggtcgaagataccttcggtgccgccggccaggccttcgttgatccggctgttgcgggtcttctcgtactgcaggtaggccagcgagctgccgaagtcccattcgccgcgatgggtgaccgagtaggtctcgcggtacatgcggttggtctcgtggccgagcatctgcttcacgtagttgttgctgttggtgttctgcgtgtcgccggtgtagatgttgccctggcggctgaagccggcctcgaactcgagggtctgctcgggcgtcaggcgccagctgagcagcccgtcgatgtccttgttgcgcacgccttcgcgaccggcggggagggtgccggcctgcttgccggtgcggttggattcgtggccggcgttgatgtcccagtcgtccgagtcggtcttggcgatgttgccgtagacgcggtagctgaggttttccgtgagcggcccgttgagaccgaagctcatccgttcgctggcgccttcggccttgtgttgcgggaaattgctgtagacgctgagattaccgtgggtttccgcgccggcctgcttggtgatgatgttcaccacgccgcccgccgcgccgttgccgtagcgcgccgccgccgggccgcggatcacttcgatgcgctcgacctggtcggccggcacccagttggtgtcgccgcggctgtcgcgctcgccgcgccagccgtagcgcaccgagttgcgcgagctgaccggcttgccgtcgaccaggatcagggtgttctccgggcccatgccgcggatgtcgatctgccggttgtttccacgctggccgctggagctgttgccggtcaggttgacccccggcatggtccggatgatctgcgacaggtcgttgctcggcggtcgcttggcgatgtcctcggctgtgatgatggaaacccccggcgcctgcttggtttcctcctgggcggtggcgaccacggtctgctcgcccagctcgatgacggagccgtcgccctggccggcggcgtgtacggcgttggcgagcaggcaactggacagcagcaggaagggaacggcgggaagggcgcgtgaggacatcggtgatctccgggcaatgcagcgaaatgcaagagatcacaaatgatattgattgttatttgagagtaaagcgcattaactttctaaacacttcgccctcaggcggccgccggcagccacaggtgcaggcacaatccgggcttgccgttgctggcccagagccggccgccctgtagctcgatggcgcgccgggcgatcgccaggccgaggccgaaaccttcgccggcgctatcgtccaggcgctggtaggggaggaagatgcgttccaactggtcttccgccacgccagggccctggtcctgcaggcgcaggtgccagaagtcgccctcgcgctcgccgtcgaggctgaccgtgccgtcctcgggcgagtgacggatggcgttgcgcaggaggttttccatggcctgggccaggctgtccaggtgtacctcgacgcgacagtcgacgcccaagcggcagggtagccgcgccgggtcccagccgctttcgaaacaggcgtcatcgcgcagcgcttcccacaccgacagcgccagcaccggctcggtgggcagttgcgggcgctcggtgtccatccaggcgaggtcgagggtgtcttccagcagtcgttgcatgtcgccgatttcgcgatccaggcgctggcgcaactgttccggcggtagctcgctgtcgtgggcgatgcgcaggcgcgccagcggcgtgcgcagttcgtgggacagggtgcgcagcagcaggcgctgctgggcgagactcaggcgcaggcgctcggccatgtgctccagggcctgggccagctcgcccagttcgtcgcggcgggccgccagcggtgcggcgaggggagtgctttccagttcgtcggcgcgcagggcgtcggcgcgatcgcgcaagcggttcagcggcaccaccaggtggcgatagagcagcaggccgagcagggcggccagcaaggtcgggactatgccgtgggtgaccaggtgggtccagggggtcagcccgccgggcagcaggcgctccggtaactggattaccagccggccctgctcgggatgtccggggaactcgatgctgacgtacggcagttcgtcctgcaggcgccggctcatcggccagtcgagcttgcgcatgaaggtcaggtggctcgactcctcggcgcttagcggcgtgctgccgaggctttccaggtgcggtccgaccagcgccacccaggtatcttccttcgccgacagttccttgcggaagcgttcggcgcccgcggcgccctctctgcgccaggcatcctccgcctgccgcgcgtaatccgccaggtagtggcggtcggccggggcgaggaagtaggtgctgcgctccaccgacaggccccaggtgtagatcagccaggtcagcagcaggcagaagccgacctgcagcagcgccagtttccataacagcgggtgcctgcgcatcaggggtgttccgtctccaccagcaggtagccctggccgcgcaccgcctggatctgcaggtgacggacggcgaccacggcgagcttgcgccgcaggttgcagacgtgcacgtcgagaccgcggtcgaggcgcgtgtagctgcggtgcagcacgctccggtagaggaacggcttgctcagcgcctcgccagcgtgttcgcggagcgtcgccaggaggcggtactcggatggcgtcagccccgccggaaggccctggtggagcacatcctgggcctggtcgtcgaacaccagccgggtatcccgccgctgcgccgacggcaggcggtccagtcgtacgcggcgcagcagggcgtcggtgcgggcatccagctcggccaggctgaacggcttcggcaggtagtcgtcggcgccgcgggtgaagccgctgatgcgatcctgttcggcgcccagggccgacatcagcatcaccggcgtggcctgctcgcggcgcagcgactccagcagggccaggccgtcgaggccgggtagcatgatgtccagcaacaccaggtcgaacgcttcgcgcccggcggcttccagtccgtgcgagccatcgccgcagacggttacgcggaagccgcgccggcggaaatgcgcgtcgagatcctcgcgtaggcgcgggtcgtcttcgaccagcagcaggcggggagatgggattgaaatatgagaatgattcacgttcgtgaatatctcatttttgccgggtatcgggcaatgggccaatgcgccgcagcgtgctcggagcggaaatacttttcgacaaagccgtcgttgcttcggctttggttctggcttagggtcggcgggtccgcaggaggcgggcaggagtgtcgtggctattggccagcctttcgcgacggcactgggttgtacgatcatctggcgcgctgctggcgcgttgttcgggccgcccgccgcaggtgactatcaaggaagattcccccatgctgttctcccaacacacccgcctggtacacgtggactccccgctgggacccgaggtcctgcaactgcaacggctggagggtcgcgaagagctgggccggctgttcagccacgagctcgaactggtctcgagcaatcccgccttgcctctggatgccctgttgggcaagccgatgagcctcgcgctggaactccccggcggcagccggcggtatttccacggcatcgtcgcgcgctgtagccagggcgccggcgccggccagttcgccagctaccaggtcaccctgcggccctggctgtggctgctgacgcgcacctccgactgccgcatcttccagaaccagaaggtcccggacatcatcaagcaggtgttccgcgaccttggcttctccgacttcgaggacgccctgagccgctcctaccgcgagtgggaatactgtgtgcaataccgcgagaccagcttcgatttcgtcagccggctgatggagcaggaaggcatttactactggttccgccacgaaaagaagcgccacatcctggtgctctccgatgcctacggcgcgcaccacagcccggccggctacaccagcgtgccctattacccgccgagcctcggccatcgcgagcgcgaccacttcttcgactggcacatggcgcgcgaggtccagcccggctcgctgagcctcaacgactacgacttccagcgtcccggcacccgcctggaagtgcgctccaatgtcgggcgcgcccatgccgcggccgactacccgctctacgactaccctggcgagtatgtgcagagtcaggacggcgaacactatgcacggacccgcatcgaggcgatccagacccagtacgagcgagttcgcctgcggggatgcgccaggggtatcggggcgggccatctgttccacctgagcaactacccgcgcctggaccagaaccgcgaatacctggtggttggcgccgagtaccgggtagtccaggaactctacgagaccggtaatggcgggggcggcgcgcagttcgagagcgagctggactgtatcgacgccggccaggctttccgccccttgccgtcgaccccggtgccggtggtgcgcggcccgcagaccgcggtggtggtcgggcccaagggcgaggagatctggaccgaccagtacggccgggtcaaggtgcatttccattgggaccgccacgaccagtccaacgagaacagctcctgctggatgcgcgtctcgcaggcctgggcggggaagaactggggctcgatccagatcccgcggatcggccaggaagtgatcgtcagcttcctcgaaggcgacccggaccggccgatcatcaccgggcgggtctacaacgccgagcagacggtgccctacgagctgccggcgaacgctacccagagcggcaccaagagccgttcgagcaagggcggcacgccggccaacttcaacgagatccgcatggaggacaagaagggcgccgagcagttgttcatccatgccgagaagaaccaggacatcgaggtcgagaacgacgagacccactgggtcggccacgaccggaccaagaccatcgaccacgacgagaccgtgcacgtgaagcacgatcgcaccgagaccgtggacaacaacgagaccatcaccgtgcatgccaaccgcagcaagacggtcgaccgcaacgagacggtcaggatcggcatgaacaagacggaaaccatcctcatggcctcgttgcagaacgtcggcatggggcgcatggaaaacgtcgggctcggctacagcctgaacgtcggcatgatgatgaacaccgtggtcgggctgaaccagagcacccaggtgatgaagaagaagaccttgtcggtgggcgatagctacgaagtgagcgtgggcggcagcgacgatggctcgaagatcaccctggacggtcagagcatcaccctcggcagccagcgcatcgagctgaccgccgaccgcgagatcctcttgcgctgcggccagagcacgatccgcctgacgccgggggagatcgagatcctctcgcccaatgtcgatatcaactgttgagcggcgggcggatgtcctgtcgcggcttttcccaaggaaggatggatagatgagcggcctaccggtttcccatgtcggcgagaaagtctcgggaggggtgatctccaccggctcgcccaccgtgcacgtcggcagcagcgcggtcggcctggccgaccgggtgtccgcctgcgtgccgttggtgggcaagccggtcaacccgatgctcggcagcaagctgctgccggaagaggtcgatttcgccctggcggcgccggacaccttcaccttcgcccgtggctacctgtcgagcaacccccgtatcggccggctcggccggggctggtggctgccgggcgagagcatgcacctggaactgagcgaagacgcctgcgtgctggtcgacgcccagggccgccggatcggctttcctgcgctggctcccggcgcccagcattattccggcagcgaggagctgtggctgcgccgcggcggttcgagcggcggcgaagcgcaggcctggcgcgggcgctgggcggcggtgccggccgaactgcagacgcaggagggctccgtgctggtgctgtccggccacagctacctgcatttccagcgttgccccgacggtatctggcgcctgcaggccagcttcggccgcgccggctaccgcaccgagttccgctggagcggacgtggcctgctcaccggcgtgcgcgacagcgccgggcgcagctatgcgctggtctaccagcaagcctgcgagccgagcgagggcgacgacggcctgcgtctgttcggcgtgatcctggccagccacgacggaccgcctccggactacatcgatccgcagagcccggggctcgactggctggtgcgctaccagttcagcgacagcggcgatctgatcgccgtgcgcgaccgtcttggccaggtggtccgggtattcgcctggcgcgagcacatgctggtcgcccacggcgaaccgggcgggctggaggttcgctacgagtgggatgtccatgctccgcacgggcgggtcgtgaagcagatcgaggcgggcggcctgacccgtaccttccgctacctgcgcgatgccaccgaggtcagcgacagcctcggccgcgtcgaacgctacgagttcgccggcgagggcgggcagcggcgctggaccgcgctggtcagggccgacggcagccgtagcgagttcgactacgacctgttcggccgcctggtcgccatgcgcgatccgctgggacgggagacgcggcgccggcgcgatggccaggggcggatgctcgaggaggagtcgccgggcaaggcgcgctatcgcaagcgcgtcgacgaagagaccgggctgctggtcgagctggaggacgcgatgcagcgccgctggaccttcgagcgcgacgaacggggcaatgcgacgacggtgcgcggcccggccggcagcacccgctacgcctacgaagacccgcgcctgcccgaccggccgacgcgaatcgtcgacccgcgcggcggcgagcggcgcctggagtggaaccgcttcggcctgttggccgcgttgaccgattgttccggccaggtctggcgttacgactacgacaacgaaggacgtttggtcgccagcagcgacccgctgggacaactgacccggcgccgctacgacccgctggggcaactgatcggcctggaattggccgacggcagcgccctgagctatgaatacgacgcccttgggcggcagacccgtatcgccgatgccgaggggcacgccacgctgttttcctggggccacggcgatctgctggcgcgggtttccgacgccggcggcggcgaattgtcctacctgcacgacgaagccggcaggctggtcgccctgaccaacgagaacggcgtccaggcgcagttccgctacgacctgctggaccgtctggtggaagagaccggcttcgacggtcgtcgccaacgctatcgctacaacgccgctgacgaactgatcgcccgcgaggatgccgacggtcgcgagaccacctatgcctacgaccgcgacggccgcctggcgagcatccgggttcccgccaccgagcacgcaccggccctggtcgagcgttaccgctggttggccgacggccgcctggccagcgccggcggggcggattgcgaggtgcgctacacgtacgacgaggtcggtaacctgcgcctggaaagccaggtacatgccgacggttgggtctacagcgtcgagcacagccacgacgcgctaggcgtgcgccagaccagccgctacggcgacgcgccgccggtcgcctggctgacctatggcccgggtcatctgcacggcgcgctggtcggtgcggtcgagctggccttcgagcgcgatgccctgcaccgcgaggtgcgtcgcgacgtccgccgcgacgggcaggatgacgcgttgttcacccaggagcgccagcacgcgccgctgggacgcctgcagcgcagccgcctgcgtctggccggcggtttcgactggcagcgcggctatcgctacgacggacttggacaactggtcggcatcgacgacaaccagtatccgtcggtgcgctacgaatacgacctcggcggtcgcctgctggccagccggcgcgctggcgcggcggccagcacctaccgctacgatgccgccggcaaccgcctggagggcgtcggcgagtacgcgcgcgaggacgctcgccaggcattcgccgagaacgaactgtaccgctccggtttcagtcgctccgagtcgcgcgcgaaccaggccggcgaaggcccggcgcgctgggccggcaaccgcgtggagaggatcgccggcaaccgctatcgcttcgatgcgctgggcaacctggtcgagcgtatcggcgccgacggcgagcgcctgcgcctggcctacgacggcgcgcagcgcctggtccatctgacgcgcgattacgccgacggcacgcggctggaggcgcgctaccgctacgacgcgctgtcgcgacggatcgccaaggtggtgctgcgcgacggtgtcgagcagcaggtgcgcttcggctgggacggcgatcgccaatgcgccgaagcctttgcgcgggaactgcgcaccaccgttcacgaaccgggcggtttcgtcccgttgctgcgcctggagcaggcctgcgagcccgatcccccggagctgctgcaactgcgccaggcgttcgccgccgaaggccagccgctgccggcgcaatgcgtgccggcgctgggcgaggcgcggatcgctttcttccacaccgatcacctcggtacccccctgcagctgagcgacgaacgtggccaactgcgttggcagggcgttccggacgactggcgggcggtagcgccggaacgacagccgggtgcgcagccgatccgcttccaggggcagtaccacgatgaggaaagcggcctctactacaaccgctaccgttactacctgccggaagccgggcgctatgccagccaggacccgctcggcctgggcggtggccccaacccctatgcctacgcgctgaacgcgcccacgctggcctacgatcccaccggcctgatcatcccgctggtggtgatcggcgccttcgccgcccgcgccgcgatcggagcggcgctgggcgccggcatcgagctggggatgcagaccggcaagcaggtgctggggcagatgaaggacaactgggacagcgatcgcgacctcaccgatatcaagtggaagtgcatcgacatcaactggaaacacgtcggcgcctcggcggccatcggcaccgtggcgccgggcatgctcagcaccggcaagaccgtggtgcagtccgccaaggcgatcaggaccctttccggacaggcggccaacaccgccaaccgcgcggccaagctggccgcgcgcaaggccgcccatgccgataccatcaagaaggccgtggctacccaggccgcctggcagacgggcaagcagatcgtcaaatgcccgctgaaggacgaagaagaggagtgcccgccgcaatgatcaagcattacctgctgatgaccctcgtctgcataccgctggcgttgctctatgtctgcctggaatggttcttcggcaacacctgggtgaccgtcggggtgttcttcggcgtgctcgtcgtgctgcgcctcgggctctacctctaccgccgctcgaagggtatcagggacggctacctggacgagtgaggccgacccggcatcgcggagcatcgacccatgcagggcctcttcgtcaatggctccgccagtcttccgccgccgatgctgtcgcgcaggcgctgctggcggcgttcgcctggtaacctggcgacctgcctatcttctttgccaaggtccgaggagccgaccatgcacgacctgcctacctacgacgatgtgatcgccgccgctgcgcggatcgccgggcatgccaaccgcacgccggtgatgtcctcgcgtaccctcgacgaagaactcggcgcggaagtcttcttcaaatgcgaaaacctgcagcgcatgggagcgttcaagttccgcggcgccttcaacgcgctgtcgcggttttccgctgagcagcgtgccgccggggtggtggcgttctcctccggcaaccacgcccaggccatcgccctctcggcgcgcttgctggggatcccggcgaccatcgtgatgccggccgacgcgccggcggtgaagatcgaggcgacccgtggctacggcgggcaggtagtgctctatgaccgctatacggaagatcgcgagcagatcggccgcgacctggcgcagcgccatggcctgaccctgatcccgccctacgatcaccccgacgtgctggccgggcagggcaccgcggccaaggaactgttcgaagaagtcggtccgctggacgccttcttcgcgcccctcggcggcggcggcttgctctccggctgcgccctggcgatccgcgcgctggcgccggcctgccggatctacggggtggagccggaggccggcaacgatggccagcgttcgctgcgcagcggcgccatcgtgcatatcgatacgccgcagaccctcgccgatggcgcccagacccagcatttgggcaatctcaccttcccgctgatccagcgcaacgtcgatgacatcctcaccgccagcgacgccgaactggtggatggcatgcgcttcctcgccgcgcggatgaagctgctggtcgagcccaccggttgcctcggcctggccgccgcccgccagcgcaaggacgaattgcgcggcaagcgggtcgggatcctgctcagcggcggtaacatcgacctggcgcgtttctgcgccttgctcggcggctagccggccgctagaggccgagtccttcgctggctgcccagcgcgccatcaggcggttcgacggcaggctttcgtcgagcagcttgcgcgcgctttccacccccgcgaccggcaggccctgcgggtcgagcaggccgatctgcaccagcacgccggcctggtcccaatagatgtgctcgtggtaaaggcggtcgccgcgaaagcgcaccacgccgagcatggggatttccacgaagcgcccggtgggtgggacgccgggcagcagccagtcgatctcgcagctgtgggtgaagcgcatgacgaactcgtcgaccacctgcagcgcccccaccgtccgcgaaatcggcgtgagggtcatgtccggcgggttgccgtggatgaagtgatggcggtagaagcggctcagttcgcgctggccgacgccgccggtgagggtcgggacatggttgacgtagggctcggcgaccatggtcgccatggtcgcggcgacgtcgcgggtatcgaactcgtggcgcacatgctcgtcccacagcgcggagaggtcgaagttcggcccgatctcccgcttcagggcggcgatgctgcgttcgtgagccatcaggtaggccggtttgtcgaagtgcatgccgccgacgcgggcgaaggcgtgatcgacgccggggtagaggtacaactcggtcttgggcaggttgcgcaggcagggcaggatcgcgtcgcgggcctgctgcgggcagtaggcgtcctgttcggcgaaatgcagcaccagccggcccttgatctgtttcgcctcgtcgagcagcgcctcgatgcccatgccgtagtagcccaccgagcaggagacgtcggtgcgcgtcgcggcgaggtaggccagcttgccgcccatgcagaagccgacgaagccgatcccggcgtggaccacctcctcgcgttggcgcaggtgctcgatacaggcggcgatgtcgtccaccgcggcgtccagatcgatgcgctggaacagctcgatggccttggcgaaggccgcttcgtcgtagcccaggtcgacgcccggctgcagccgccagaacaggtcggggaccagggccacgtagccctcttcggcgtacaggtcggccaccgcgcgcatgttcgcgttgacgccgaagatttcctgaccgatcaccacgcccggccccttaccgctggcggggagcgcgagatacgcgtcgaaccggccgctgccgtcggacgctgcgatgctgacgtactgtcccatgcctggattcctcatcgggttgttgttggagtgggaaaacgggaaagcgaagcgaaccagcctagtaggaaccggtcggcgggtcattggctatccgcatgctggcgggagggtatccggattgtccgggagcgaggggcgggaggcggcgcgctcctcggcgagccgctcgcggataccgctcaggcccgctggcgctgccagggcgggccagcggcgaaccgcgcttccacccattggcggaacgcgctggccgccgccgtggcgtagcgcgccgaggggcgcaccaggtagacgccggcgtcggcgtccagttgccactccggcagcacccgtaccagcctgccggcttcgaggtcgcggctcatcagccactcgccggcggcgaagatacccaggccctggcgtgcggcgcagagcagggcctcgttgtcgttgctgaccatcgagccgcgtacccgcacgggctgctgttcgtcctggcgggtcagcttccactccgggtacgagtgcagtccgctgaagccgaggcaattatgtgccgccaggtcggccgggatacgcggtaccccatgccgcttcaggtagtcgggagcggcgccgaggatgcgccgatgggcgcacagccgcctggccaccaggcggctgtcggccagttcgccgacccggatcgcgaggtcgaagccttccgcgatgatgtcgacgaagcgctccgaatagtcggtttccagcaccacctgcggatgcgccagggcgaactccgccagcagcggaccgagccagagccggcccatcgccgacggcagggcgatgcgcaggcgtccgcgcagttgcgcggcgcccaggctggcttcgtgctcggcctcgtcgagcaggtcgacggcctggcggaagcggctcgccaggcgctcgccttcatcggtgaagcgcagttgccgggtggtgcgttcgaccaggcggatgccgaggcgacgctccagtgcgccgagccgcttcgagagcaccgagggatggcgttgcagggcgcggccggcggcggcgaacgaaccgtgctcggccagggccaggagcgtggcgacttcatcggcctgccggctgtcgaacggttgcatgcatgcgcctcttgcgggtgggtcagggcaagagtaccagcgcgccttgcgagcttccctccagcagatcggtatgcgccacggccgcctcggccagcgggtagcgccgccagacccggggctgaatgacaccgtctgcatgggcgcgcagcacagcctgcgcgcgtagccggtattcctccgggttggcggtgtgggcggcgagcgagggacgggtgaggaacagcgaacccttggcgttgagggtggcgacttcgacggctggcggcacgccggaggtagcgccgaaggacaccagcaggccgcgcggacgcaagctgttcagggatgcctcgaaggtagcgcgaccgatggggtcgtagaccacatcgaccttgcgcccggcggtcagctcggcgacctgggcggcgagactggccgcgtcgaacaccagcacctcgtcgcagccggcagccctggcccgctcgacgctttccgccttcgacaccacgccgatcacccaggcgcccaggtgccgggcccaggccgccatcaactggccgacggcgcccgccgcgccgtacagcaggatgcgtgtgccgggcccgacggggtaggtggcgtacagcaggtagtgcgcggtgatgcccttgaacagcagcgccgccgcgtcctcgaaagcgagtgtgtcgggcagcttcagcaagcgctcggcggggtagagccgggcgctggcataggcgcccagcgggccggtggcataggcgacgcggtcgcccggcgccagtccggagactcccggacccagcgcggcgaccactccggcgccttccaggccgaggccggacggcagcggaatcggtaccgctcccgagcgctggccgaggtccagcggattgacgccgatggcggcctgctccagccagacctcgccggggcccggttgctgcgcctggacttgctccaggcgcaggacctcggggcctccgtttgcgttgagggtgatgcgactgggcatggcggtctccttggctgcgttcgtcgttccggcagtctaatgaagcatccggggatgaccaggtaggttctttgcagttgattgctgcaccgcatgcagtagtgagacggtgctccaaggtgaccgaaagtcgtgtttccgtatcgacaggattcgcctagtgtaaggcggcagcctggacggccatggtccctgtggtcgccgggatcatttcgggagagtcccatgacggcacctttcaaggatcatttctccacgggttcggcgaactacgccgcacatcgtccgacctacccggcgcagttggtcgacgagctggccgcgctctgccccggcacccgcctggccctggactgcggctgcggcaccggacagctcacggtgctgttggccgagcgtttcgaacgggtggtcggtaccgacgccagcgccgcgcagatcgacaaggcgcaggctcgcgagcgggtcgagtatcgcgtggccctggccgaggacagcggactggcggcggccagcgccgacctggtgacggtcgcccaggccgcccactggctggacctgccgcgcttctacgaggaagtccggcgtgtggcccgcgcggacgccatcctggccctggttacctatggcgtattgcatgtcgacggacccatggaaccgctggtccagcacttctaccaccaggtcgtcggcccctactggcctgccgagcggcgccacgtggaggagggctaccgcaatctgccgttccccttcgaggagcgccgcctgccggacctggccatcgaggtggcctggaccctggacgagctgctgggctacgtcggtacctggtcggcggtgaaggaggccggcaaggcccttggccaggatccgggcgccgcgttcgtcgatgagctgcgcgaagcctggggcgacccgcagacgcgctatcgggtcagttggccgctgacggtgcgcgccggggtgatccgctgagccatcggacgcaatccgaaactcaaccatgacggcggggagagcgccgatcgcgtccgcctgccgtctacgcaggtcgctgcaaccccttggcagccgcggcgtcgcttgagcgcgggcacagggggcaggtggtgcgccgagtcgtattcgtcgaactcgccatgccgccccaggccgggtcggcgtgcaggttgccagttcctggcgtacggggcgctcagtgcgtgctttcgtttcactgagcgaggttttccagcgctatgaagaaatcgccccgattgcaggatgagtcttgctttcgtcccggtttccctgccgctggctgctgaatcgagggtgcactccgcgcagtccggcccctcaccttgagagccgttgccattgtcggggttacccacgtgctttccagcaggtacggagccgatgggagatcgagttggcgagagtgccggcttgctccggccttctgaaggctcttcttgaatcagaaaaaccttacgccagaagtagtgggggctgatggccccgctcgcttcgatccttcatggttagcgggttctgttcttcttcgccgtggagagtttttctgtgagtggttccctcttggtaccggccagtctcgccagtcgcatcaggctcctgctggtcatgacccggcgcgaggtcgaactgcgttatcgcgacgccatgttgggccgcatctggatcatcgtctcgccgttcctgctcttgctgatctatacgtttgtcttcggcttcgtgctgaagtcgcgctggggtggaagccagagcacgctctccttcgccttgaccctgttttccggactcctgctgaacgggatcctcgctgaaagcctgtccagggccccgactatcatccaggccaacgccaactacgtgaagaagctggtttttcccctggagatactccccctcacaccgctgctggccgctttcttcaacgccatgctcggctacctggtgctctgtatctttcttctcttcagcggcgtcgagccaggctggcaactggttctgctaccgcttgccctgctccccttcctgctctgcgtgacggggctggcgtggttcctcgcggggctcggggtctatgttcgcgacatagggcagttcgtccagtttctcctggtgcttctgctattcatcagcccggtgttctatccgctgtcttccttgccaccggtaatgcagccctacctgtacctcaatccgctgacgatcccggtggaaatggtcagggcgatccttttcgatgctccctatccgacccttggggtcttcagcgtttattgcgttgcgtctctgctggtctgttcatcgggcttcctctggttccgtcgggttcaggaaggttttgcagatgtcctctgaggccgtttccccgggcccgcagatgacggccgagtggataccgctggggcagcgtttgctcgaacgcgggttggtgagcggccaggaactcgagcgggcgctcgacctgcaacgccggcttggcggccgtctgggaggcattctcgtgcgttccggagccatctcggaaaataccctcatgcaggtgctggcggagcaactgcggttgccgctggtgggggacgacctgcggaagccgagcgaagagtccatcgccgcattcctgctcagtaccccgatcaataccgactggttcgtcgaagagcaactggtggtctgggaggagggcgaacaactgctgttcgcggcgcgtgatccgttatctccttcgatacgcgaaaccctgggctatttctatccggagcgctcgattcaagcagtgctgtgccgctcccaggatctggacggctggttggagcactccctggacctggcccggcaaggtgcggatcggcacgcctacggcagcgaagacatccgctacctgcgggagctggcggaggaggcgccggtagtcgaactcgtcaacaacgtgatgagccaggccatggaaaagcgttcttcggatattcacatcgaaccccgggagttcgacttccgtatccgcttccgcgtcgacggcgtcctgcacgaccaactgagccttccccgcgagcgattcgcggcggtcgtctcgcggatcaagctgatctccgccatcgacatcgcggagcgacggttgccgcaggatggacgcatgagcatccgggtcagcggtacggagctcgacgtgcgggtctccaccttgccaggggtgcatggcgaatcggtggtcatgcgcctgttgccgaaggagcgcgaggggttgcgcctggaccggctcgggatgctcccggaccacttgcggaggatgcgtgcatgggtagcggaaccccacggcatcatcctggtgaccggccccaccggatcgggcaagtccaccacgctctatggcgcgctggaggaaatcaatgatggcgtgcgcaagctcatcagcgtggaagatcccgtggaataccaggtgcccaatatcacccaggtccaggtccatgccgacatcggcctgaccttcgctgccgccttgcgctcgatcctgcggcaggatcccgatgtgatcatgatcggggagatacgcgacctggagacggcggagatcgccgtacagtcctcgctcaccggtcacctggtgctttcgaccctgcataccaacgatgcggtgagcgccttcacgcgtttgatcgacatgggcgtggaacccttcctggtggcttcgccggtgcgcggtgtccaggcccagcgactggtgcgcaggttgtgcgcccactgcgcggaaccttgcgagccaacccttgctgcggccgatctggcagcgacccaggcggccaccgcgcggctgttcccggggcaggcagcgcaatggcgcgtggcgcgaggctgcggccgctgcgaaggtaccggctacagcggccgtgtgggcatctacgaactcgtcgatctgtcttccgagatgcgcgacctgatcgtgcagagagcttccctcgaacagatgcatcggcttgccgccagccagggacagcgcaatctgcgtgaagatggcttgatcaaggcctggttgggtatgaccagtcttgacgaggtgcatcgcgtgaccagcggctaagcccatgaatttcatctaccaggccgtcgatcgcaagggcaggcgcgttcgtggcgaactctgcctccccacgcgccaggatgcgctgcggcagttgcagcgccaggggctcaccccgctcagcctggaggtgaaacgccgcaacctgggctcgcgacgtcggctcaaggccgaggaattgaacatggccatccacgagctggccaccatgctcgcggcgggagtgagcatggccgacgcggtggaggctcaggagcgaggcgcgcgccacccgaagttgattaccgccctgcaggcgatggccaatggcctgcgccaggggcaatcctttcccgtggtgctggagagcgccggcctcgacttgccgcgctatgtatatcaactggtggcggccggcgagatgaccggaaacctcgcaggagccttgagggactgtgccacgcagatggaatacgaatggcgaacccgcgccgagttgcaaggggcgctgatctaccctgcgattctggtgctcagcggggtgctcgccgtggcgaccctgttcgtcttcgtcgttccgaaattcgccaatctcctgaacgagaccgcccagctcccgtggcttgcctgggcagtgctgagcatcggggtatggagcaacgagagttccggcttgctggcgttcgccgtcctgctgcttgctggcggcatcgccgtggcgctgcgcaatccggcgctccgcgcccatgcgctcgaccagttggtgcgcctgcccgtagtcggggaatggttgatgcaggcggaaatagcgcaatggtcgaaggtgcttggaaccctgctgggaaatcgtgtgccgctggtggaggccctgctgctttccgccgctggcgtccgcattgcccggcagcgccggaccctggagcgagtcacccaggatgtgcgggccggcatcgccttgtcggcagcgttggaggagcgccaggcggtcacgtccatcggttcgagcctggtgcgggttggagaggcttccgggcagctcgcggagatgctgcgtcgcctggcgacgctctatggagaggccgggcaggcgcgaatgaaaaaggccctggtactgtgtgtcacgaacacaggtcagatgacctgtgctgctgtgccgaagatggaagtaggccttccgaagtcggcttgcaggagcggacttcaaaccacccggtgctgctgcatccaaaaggtgtggtggtgagcgaccgaggaaaagtcatccctgaggatggcaggtgagtatggagaagatgagcgaaagcaaaccgtccgatgacgcatcgttatgcccaaggtgctgccgaaactgaggtggagtactggcttcaggacaagtcggggcgttacctgcttacggacccgatggcagccggtgtataggcggcatgatcttcatacaggctttggtacggaacgtgagaaccttgttccagatgcgaaggaaaatgacaaatggccaacaccatgaggaagaataccgatgctggaacgaggggcggagcttcccgtagtagcgatgaagcctctgtaatggaggtggagcgaaggggcggcgttatccggccgacgagcgttgccaacctccggggatgagtggcgtgagctcggcgaaaccttatgacatagcgaaacgcacggtatgggacgcctaccagcaggtcagggccaaccgcggtgctgccggcatcgacgatgaaaccatcgccgatttcgagcgggatctgtctaagaatctctacaagctgtggaatcggatgtcgtcggggtcgtacttcccgcctccggtcaagcaagtagaaattcccaaggcatcgggaggcacgcgcaagctgggagtgcccacggttggtgatcgtgtcgcgcaaaccgtggtcaagcttctcatcgagccggagctggactcgatcttccactcggactcctatgggtaccggccgggacgatcagcgaagcaggcggtggcgatcacgcgtgagcgctgctggcgatacgactgggtggtggagtttgatatcaaggcagccttcgatcagatcaatcatgggttgctgatgaaggcggtgcgcctgcacatcaaggaggactggatacttctgtacatcgagcggtggctggttgcgccgttcgaaacggatgacggcatgcgcgtcccacgcgaacgcggcaccccgcaaggtggagtgctcagtcccctcctgatgaatctgttcatgcactatgccttcgacacctggatgcaacgtaccagccccaactgcccgtttgcccgctacgccgatgatgcggtggtgcactgccgcagtcgaaagcaagcggagtacgtgatgcgctccattgcttcacggctggctgcctgtggcttgacgatgcacccggagaaatcgaaagtcgtgtactgcaaggacagtaaccgtcgcgcaggttatccgcatgtgagctttaccttcctcggcttcacctttaggccgaggaaggcgctcagcaaacaagaccagctcttcacgagcttccttccgggagcgagtgcggatgccttaaagcggatgcggcaagcggtacgcaggtggcgactcaatcgccaaacccacgtgacgctggtcgacgtggctcggctctacaatccagtgatacaggggtggtggcaatactatggctcgttctatcggacagccatgcttggcatcttccagcacattgaccgcgcgcttgaacgctgggcccgacgaaaatacaaggcccttcataggcgcaagcggcgcattagccaatggctggacaagatgcggactgtggtaccccggctgtttcatcactggcgagtgaccgggcagcaaggttggataacgggagccgtatgacgcgagagtgtcacgtacggttctgcgagcggctgcgggggcagttcccgcggccgactcaccgatcgagcctttggcgatcctgctgatcggctctgtgttcggcctgatcattaccggcgtggtactggcgattaccagcgccaacgacatggtgctttgaatgccgggtatcgatgccgcggctggttggatgagacgtgaagtggaaaccgtatgaacagagctgcacaacagggcttcaccctgctcgagatgattgtggtgttggtgattatcggcatgctgatggggctcgtcgggccgcgactgttcaatcaggccgacaaggcgaaggcgcagacggcggatacccaggtgaagatgctcaagggcgcgttgctcaccatgcgcctggacatcggccggctgccgaccgaagaagaaggcctggcgctactcaacacgccgccttccgatgaacgtctcggggccttctggcacgggcccaacctcgagggcggcgtaccgctggacccctggaaccggccttacctgtacagcgacaggccgagtgccgaacaacccttcactctctacagccagggcgcggatgggcagcccggtgggaaaggcctggatgccgatgtcggttacgcgcccaaacgttgaccaggccgcgttcaccttgctcgaactgctggtggtgctggtgatcgtcggggccattgctgcggtggcgttgcccggcctggtgaggatgcaggagacctgggcgcgcaggaccgcgctggacgatctgttcaatcaattgcagaccttgggctatcgcgtgcgcagcgatgggcgggagctgctcattggtgagagcggggcggttcccgagcagttgctgcgactgcccgatggctggacggttactgctcggccgccgatacgttacatggcaaacggagtttgcctgggcggaaagttgcaggtccatcatgggcgcgcgacacatacgctgctgcttcagccacccctctgcgcgcccgggacgatccgctgatgccggcgcggcaggaaggcttcacgctcctggaggcggtggttgcgctgacgctcctggcagtggtcggcggtgcgctattcgcctggctcaacagtgcctttcggagcatgcagcgggtcgaggcggccgagctgcgcatcgagacggcccgggtggcgatggcctatctggagcgcatgaaccctgcgctcgaacccgcaggcagggcccggctggggcattaccggctggagtggcgaagttcgccgctgtccgcgtcgaaagcggcggtgggccgccatagcggcagtccgggcatctacgacgtgaccttgttcagggtcgtcgccagcatccgggccggcgatggaacgccgcagacgctgcaactggagcttcccgggtacgtggtcatcccagcgcgactgggtgatggaccatgatccgctcgcgacgaaaacagggtgcattcaccctgctcgagatgatcgtggtgctgctggtcgtttccttcatcggcacgttgctcatgcaagggttgagctatgccagcaaggccaaccagtccttgcaccagagcctggggcgcggacaggtccgggcgctgaccttcgattggttccgtgatgcggtggagaacctggtcgctcccgaggctggcgaggtccgctggcgtctgcgaggggacgaactcagtttcgaggccatgtctgccgcggccctggatcgccgtgcgggcatcccgacgcccttggccttccggcttgagcggcgggcaggagaggaccggaccgagttgatctatgtgcgaaggctggaggacagtcgctggcccctcctgcatctgcgcggcgaagctcgcttccgctatctggacggtcacggccagtggcaccgggactggccgccgagcgcgcaactggccgatacccttcccgaggcgatggcactggcggctcccgaggagcgcctgtttgtccttgtcgcggtcgcactgcccagagcgaggcccgccgaacatgatttctgatggcgcacgccgacatgcggcgtctgcgcgctcgtctggcttcgttctggtcggagtggtctggttcctggccatcatgaccctgctggccagtgccgctgtactctgggtcgggcgctcgctggatgccacggaaaaccggcgcaaggtgctgcttcgtgagctggaggagcatgccttgctggcgcgggtccaatggctggtggctacccagcgctataccgtcgcgggcctgagcgtaccgggaaatgctggcgccgcgccgagcaaggtggacatggacacttcgatcctgcccattggcggggagctgcctctggatggccgggagttctgcatggccaatggctggtgcgttgcgctgctcgatcgctctgcgcgcctcagtctttccggcatcgatccgcgggtactgtccaggctgctggcggggttgggggttcccgccgagcaggtgcaggtcatggtcgcccaatggttcagctatctctatcccggcgccgctccacgactgggtagtgccgcgcaagccagcgacaggtcctctccgggccaggcccggcgccgtccgttgcgttcggtgatggaagtcttccggctggaggcctggcgcccctgggaagcgcatttgctcgacgccggttggcgcgatctggtcgcggcggacgaggcggcgctgaacatcaacaccgcggatgcccgaatcctgtctcttgcctggggactaccggaggacgctgtcggccgactgctgcaagcccgctggcagcgtccgttcacccggatgtcggacctgcatgacgtcctcgggggtcatgcgaggctggttcccgaggatggctgggcgcgcctggccagtccggtcctgtcgattcggctctacccgccaggagccgagcaggggacggaatacgaggtccgcttcaactcagagcaccgcctgctgccaccctggcagcttctctcgaagaggtccgtgaagataaatgatcgctactcgaatcctccgctgcatcccgatatcgcccccggggttcttgccgccccgcttgtggcaaggccgtggtaaggatggccgggcgcagcttgagtgggtacgtagaggtacagggttggcgcggcgcgccccagcgcagtggatcgtggatcgggcgtggtgtgtctatcgctgtctcgatctcaatcatgtgccgcgctctgaccggtatcaggcactggcgttgaagcttgccgccctggcgccttttcgccgcgcgggccattacgtagcctggcggggtggccatgctctggtctggttctgggatgaggaggtccgggaggccgttgccgaagactgcgtcgaccaacctcggcgttatcgctgtatccccgaatccctgctgcaggctccccctcggtcgatcgcggaaggcgagacggttcggctgcttcgggttcgctccgggctggatctccaggtctggagagatgactgccttgtcctgagccatttctttcccagcccaccccagccagaacaatgggttcggttgctccgggggctggcgggaatacgcatcccggagagcctggttgccgagcctggagagtcactgggccgtccctgggccgttccggcggcggaagcaacgctgctgcgatgggagcgttggttgccgcatgggctcatagccaccctgttgctgggatgcggattcaatctgggggaaggtttgtcctggtggtgggccgagcgtgcgctgcgaacgcagtacgaccagctgagcggccaggtctcgccgatcctcagcgcacgcaaccaggccttgcagaccaatcggatggccacggagctggggcgcgctttgcagcatcgctcgcaggtggcgctgctgggacaggtagcggaactgttgccgaaggacagtcggttgctcgcctggcgctatcgaggctccgagctggagttgcggattgccaccgacagtgtcgacccgcgtctctatgtgaggcgtttcatggagtcggggagtttcgaagatgtcagggtggaaccttcgcagagcgaggggctatcgctgagcctggtcctgcgtacgccgggggagggtgcctgatgtcggacttccagcgatcactgcagttccaggggcggaacctgcaacgacaatggcaggaaaaaccactcttgcgcatggccatctggagcctgtgcctgctgctggttgtgcatctggtcatgctcagcatggattggagggaggaacgaggggaggaatatcgtcgtctggccggggaatggctcaagctccaggacgtttcccggcagaccgcctggccggagcgggcgatgcaggcgaagcaggtcctgaaccttcagcgagagcgcttctggcaggcgccgaatgcgtcgcaggcgagggccgatgtgcaggcctggctgaccgagcgggttcgcctggcgggcgtccctgacgcggaagtgagcgtactgcttcctcgcggcttcgagaagcaagggacgatcgcgcgtatcgaggcccaggttcgcgggcagttgcagccagcctcgttcagtcggttgttgcaggatatagaagcggagcagcgacaagtatcggtggagtttctggaactgaacaatatgttgtcgcccatgctcaatctacagttgtcgttcctgttcgtagcggcctattgaagcggatgcggatcgggcagcacccgtttgccggaagagttcggcagagggcggtgcccgtcgatggagcgagttgccgccaggcggccgggaaaccgaatccgctcgggacgcctgcgattcggctccccggcccgccattgtcgcattcgcgcagcgaagaacggccagtctggtccggcctgtaaacaagtgcaaaattttacttcatggtcggcttggcactccgagccggctcgtccatgctggagcacaactttcccatggataccattgccatgaagttcctgctgcccctgctgctgttattcccgctttccgctctcgccgacgacaaggactacgaccaatgcatactcgactaccaacgcacggcgaagagcggggtggcggttcacttcatcacccaggcctgcgacaagttgtataacgacggctccttcctgctgtcgcgggaaaaggcttattacgagtgtctgctggagaacctgccgggggtggagaacaacctggcggcgcagaagatcaggagcgcttgcgaatcgaagtcgcagaattgatctggcgaggaggggagcgaaagtagccagtgaggtttccgacggcatcggcaggatgccgtcgggaaaaccggcttagcgttgcagccaggattcgacggtttcggaaccgtactgttctttccaggctttcagaaccttgtggttgccgcccttggtttcgacgacttcaccgttgttcgggttcttgtagaccttcagggcgcgggcacggcgctgcggagcggcgctgacggtgaccggagccttggggtcgaggatggcgatgatgttgtgcagggtcatgccgtacttgtccatcaacgcctgcaacttgtccttgaattccagttcctgcttcaggctgctgtcgcttttcagcttttccagcagggccagttgctcctgaagtttgcgctctgcctcgcggaactcggcaagtttggacattcgtttcactcccgttctaaaaatatggtgctgggttttggtgcatttatagtggctttacggactttccgtgtccgcggcaaaggataagtctttatctactggaagaacaatatagttgcacggttttattgactaacggactgtggggacagcttgccggatgtttcccggaagaatatgaaacctttatgtccgtggggataatgcttcgtacaacccatgggagagagatggcagaacgggcccgttgtgtggaagcccgttttagagcagatggcgaagcgccaggggagagtcgggcgaatcaatcgccccgatattcgcaaccgctggtgcaagtttcgtggacgcggaccttggagagttccggcaacagcggcttgagttgttgccagatccagcggcagaggttttcgctggtggggttttccaggcctggaatatcgttcagataattgtggtcgagttgctcgtagatcggcttgaagatcgccttgatttccgcgaagtcgcggatccagccggtatgcggatcgacctcgccttcgatgtggatggcgacacggaacgagtggccgtgcaggcgcccgcatttgtggccttcggggacgtggggcaggcgatgggcggattcgaaggtgaattctttgaagagttccactgtagtgcgctctggatcggggttatcggacaaccggaatgggggcgccatggtagcaggtttgcgcgccggacccggtgcgctccgaccgggcggtcgtttacctgagttgcaggcggcgcgccaggcgcgccaggttggcgcgatccaggcccagctcgcgtgcagccgaggcccagcttccctggtggcgggccaggcagtcctggatcaggcggcgttggtaggcgtcggtggccgcgcgcaacgagtgaccggtcgttggcgcggcgggcgcgggctcgaccacgctgcgaggtggcgcgggggtttccgcgggcaggtcgagatcctgccgatgcagggtgacgatccgcgaccgctccggattgtggccgagggccttgagcgaggcgcggccgaccaggtgctcgagttcgcgcacgttgcccggccagcgatagtcgaggagcgcggcctgggcctcgtggtccaggcgcaggctgcgcagtcccaggcgcggtcggttttcctcgaggaagtagccggccagcaggaggatatcgcggccgcgctcgcgcagcggcggcacgcgcaagggatagacgctgaggcgatggtagagatcggcgcggaagcgcccggcacgcacttcctcggccaggtcgcggttggtggctgcgagcaggcgtacgtcgacgcggtgctcgcgatcggagccgacccgctgcaactgcccgctctgcagcacgcggagcagcttggcctgcaccgccagcggcaactcgccgacctcgtcgaggaacaggctgccgccgtcggccagttcgaacttgccgcgccgttcgttgaccgcgccggagaaggcgccgcgcacatggccgaacaattcgctttccaccagggtctcgggcagcgcggcgcagttgagactgatcatcggcttgccgctgcgcatggaatgccggtggatggattgcgccaccagttccttgccgaccccggtctcgccggtgatcagtacgctcaggtcgctgttggcgaccaggcggatttcttccagcagcgccttgtgcgcggcgctctggccgatcatttcccgtggccgctcgccagcggcttcgagataggcctcggcgcgctggtgctcgtcctcggcgcggcgggtcaggtcgcgcatccgctcgctggccttgaccgtggcggcggcgaggctggcgaaggcctccagggtatccaggtcggcgctggcgaagcgcgacggatcgagggtatccagggtcagcaagccccagggctggtcgtcgaggtacagcggacagcccaggcaatcatggatttccaggtggccgtggaggccttccaccagaccgtcgtagggatcgggcaggccgcagtcggcggggaagcgggtcggcccgcggcgctccaggagggcctcgaggcgcggatgttcgccgacccggaagcgccggccgagggtgtccgggctgaggccgtccaccgccagcgggatcaggtattcgccgtccaggcgcagcagcgcggtggcgtcgcagggcagcaggtcgcgcagggcctggagcaggcggcggtagcgttcgtcttccggcaggtcgcgggacaggtcggcaaccagcgggatcagggtggcaagcaaggggttggtggtcatttcgacctctttgcagtcctaatgactctgaatggttgcagtcattatgacctatgccggcctgcaaggcccgtgaattctggtagtttgccttggcacgcttcctgaaatgcttcgaggtgaaacaaaaccttgcatgcgtcaggagtcatctatgttgtccaatgcccaacgtgccctcatcaaagccaccgtaccgctgctggagaccggcggtgaagcgctgatcacccatttctaccgcaccatgctcggcgagtaccccgaggttcgcccgctgttcaaccaggcccaccaggccagcggcgaccagccgcgggcgctggccaatggcgtgctgatgtacgccaggcacatcgaccagttgcaggaactcggcccgctggtggccaaggtggtgaacaagcatgtctccctgcaggtgctgcccgaacactatccgatcgtcggcacttgcctgttgcgggcgatccgcgaggtcctcggcgaacagatcgccaccgacgaagtcctcgaagcctggggcgcggcctaccagcaactggccgacctgctgatcgaggccgaggagtcggtgtatgccgccagcgcccaagccgatggcggctggcgcggcgtgcggcgcttccgcgtggcacgcaagcaggcggagagcgaggaaatcacctcgttctacctggagccggtggacggccagccgctgctggcgttccagccgggacagtacatcggcctgcggctggacatcgacggcgaggaagtgcgccgcaactattcgctttccgctgccagcaacggccgcgaataccgcatcagcgtcaagcgcgaggcgggtggacgggtctccaattacctgcatgaccgggtcgccgagggcgacgagctggatctgtttccgccggctggcgatttcgtcctgcgtgacagcgacaagccgctggtgctgatcaccgccggcgtcggcatcaccccggccctggccatgttgcaggaagcgctgccgcaggcgcggccgatccgcttcatccattgcgcccggcatggcggcgtgcatgccttccgcgactggatcgaagacgtgtcggcgcagcacgagcaggtcgagcacttcttctgctacagcgaaccgcgcgccggcgacagtgccgacgccgagggattgctgagccgcgagaaactggccgactggttgccgcaggagcgcgacctggacgcctacttcctcggaccccggcctttcatggtgcaggtcaagcgccacctggccgacctcggcgtaccctcgcagcaatgccactacgagttcttcggtccggccgccgcgctggacgcctgaagcgacgggccggcgcgaggtgcgtcggccctttttcggaaaaaggagatcgagatgaacgctctgttcgattgtccacggcgggtgctgcggatcggtcacgggctgctggcggccggcctggcgctgctcgtcgccggcgtgatcgccgcctatttcctcgaccgctacctgaacatgccggcgctggtgttttcccatgcgctggtgatcctcggcccgaccctgttgaagattggctacgtgatgcgcctgagcgcgctgttccgcatgcgtcgacccggttgggaggtctgctgtgcaagtgcttgatcgttccaggctgatggccataccgccgatctggcgcctgggcttccgcccgttcttcctcggcggcgcgctgttcgcggtcctcgccatcgcgctctggctggcggcgctggccgggctctggagcggctggcaaccggtcggtggctggctggcctggcatcgtcacgaaatgctcttcggtttcggcgtggcgatcatcgccggcttcctgttgaccgccgtgcagacctggaccggcgtacccggcctgcagggcaaacccctggccctgctcgccgggctctggctggcggcgcgcctggcctggctattcgatgcgccgctggcgctgctgctggtgctgcaactgagcttcctgccgctattggcctgggctatcggtcgcagcctgtggcgggtgcggcagaagcgcaattacccggtggtgggcctgttgctgctgttgaccctggccgacgccctggtcctgctcggcctgttcgagggcaacgacgactggcaacggcgtgcctccatcgccgcgctatggctgatcgccgggatgatgaacctgatcggcgggcgggtgatcccgttcttcacccagcgcggtctcggccgtcagcagcaggtgccggcgatcgcctggctggacaatggcatcctgctgggctgcgtgctggtggcgctgctcaccgccgcgggcgtcacgacgcagccgacgccctggcttgcaggactgttcgccgccctcggtggtgcgcaactgtggcgcctgtggcgttggcgcgatcgcggcatctggcaggtgccgctgctctggtctctgcacctggcatatttctggatcgccgtggcgccgcttggcatggcgctctggagcctgggcctggcgctggcgccgagccaggcgctgcacgcgctggcggtgggcggcatgggcgggttgatcctggcgatgctggcacgggtcactctcggccataccggtcgcgcgctgcaaccgccggcagcgatgccctgggctttcgctctgctcaatctcggctgcgcggcgcgggtgttcctgcccagcctgttgccggcgaactgggcgctgcccctggcaggcggactgtgggctttggcgttcctgctgttcgcctggttctatgcgccgatgctgtgtcgtccgcgggtcgacggccatcccggttgatcagggggcttgccgcagacgccgcagctcctggttcagccagtcggcggagttgcgcgtctgcgtggcgcagcgcacctggtagggcttgccgctgaggctgctctgggtcgcggcgcgctcgatgaagtcctcgctgctggcgaccagatccttgcgctccaggtagtcgagcttcttctgcaggtgggcgcgggcctccgcggccgggtattcgctgccgttgcggatgaaggtgcagccgctgtcttcaacaaagctcagcaagcggccgatctcctggctcgcctgcggggagggcgtggccagcgccggcaggctcgaggccagcagccaacaggcggcgcaggtagtccgccaggtaatcgtgaaagcgcgcatcgttccagtactccatgtggctcaacggggtgtgccgcttgtaccagggaccgaccggcagggcgaggtcctcgtggacgaccgcggcgtagttctgcaacggccgcagcggatagccgagcggatcggccggcgcgtagacgttcagccagcgtgcctgctggcggatggccgggggcaggcagtggccgggaaagcggatcgggcagaccttctcgtaggcgaaggtgaacagcgggatgttgcaaccgaaggtgaccagcccggccagggtttccaggccgaggaaggggtcgatcgagcaactcggcgtgcggttgagtttctgctggtcccagatgaaattggacacgatgtgcccgcccagggagtgggcgaggatcaccagcggcgtctgcggcccgactttcgcgcgcagggccatgatcccgctacgcacgtgctggtggacctgctggtaggtggtgtcgtaggcggcgctgaccttgcggtagccgctggcgtcgccgaggaatagcgtcaccgcccggcgcagccagcgccagcccagcggctcgcgctcgatgcgcttgaggtagtccagctcgcgggcgtccagtacgctggcccagtacaggctctggaaggccacctcgccggcttccgcgccgagacgtcggcgcagcgccgccaccagttcgcgggcgtagctgtgcagaccgtcctcgtcgcggctatcgggctggtcgccgatgccgtggatcagcgctacggccagtttcatgcaggatccttctcgtcggtggcggctcagtccagcgcttgcaggtgttcgccgagccggccgccgtcgaccagttcgaggaattcgtcgccgagcctgcggctttccgccatcgcctggcgccagtagcgctcgcggccgtcgtcgtcgccgaggtagcgggtgaagtccttgcggtccggcagcttggcgtgcggcaggcgcgccaggtactcgcgcgacggcgccagcagcagcacgtcctgcaggcgcccggcgtcgccacggcgccagggcaagcccttgtcgaaccagccggggatcaccttgtcggtgaagtgcgggtagagcaccacgccgcggtcctcgtagggcaggtcgagatggtagtcgagcaggccgccgtcgcggtaggtgccggggccggcgccaggcaggtcgcggacgccttccatgaccatcgggatcgagccggaggcgagcagcgcctggcgcaggttgccgccgtccaggtgcaggtagcgcgacgggaagtcggtcagcgcggccagcggcggcgcctggcgggcgtcatgcaggatcacccgttcgaagtggcggtgcagatggcggcggccgatcaggttgtcgcggatcaccgaggacagccccaggccgaggctggccttgtggtcgtgggcgaggcgcccgtggctcttcaccaccaccacgttgaggcggtacagcgggttgtcgaggatccgcgcgtcctggccggcgagcaggtcgtcgagcatcgccgcgcacttgcgcgagacttcggcgatgctcacgccctttggaaaacgctgccgggtgtacagctcgccgaggcgggtgaggccggccacggcgtcgggcaggcaggcactggcgaagcgccaggaaccgatggaggcgccgatcagcgagcgttcacgcggggcgcgcggcagccactcgccgaagatcgccaggtccagtccctggatgcccagcgcctttggcccgccggcggcaccggggacgatgccgacgtcggccggctgcaggccgcgttcgcggatgcgggcgagggcgcggcgaccggccttgagggtcagtgcgggggacttgatctggatggctggcatgctggtcttctcccttgcggaccggcgattataggacgagttgtcgcaggaccaagcgctttcgaacgccggcgagccccatcgcagaggctttccgttaccctatggcgcgccccggccatgtccttgcggcaaattcagcttcaattaagagcgcccggttaatctgcaaaccgtcgaaagcaacacgattgattcccacggagagattcccatgaagaaactgactgccctgttcgccgccaccgccatcgccctgactgccggcctggcccaggcccgcgacctcggcccggacgaggcgctgaagctgcgtgacgccgggaccatcaagtccttcgaagagctgaacaagaacgccatcgccaagcatcccggctcgagcgtccacgataccgagctggaagaggaatacggccgctacatctaccaggtcgagttgcgcgacccgcagggcgtgaaatgggacctggagctggatgccgctaccggcgccgtgctcaaggaccaccaggacgactgatgaagtggctcatgcgctacgccgggatcgtcgcactggtcctggcggtcatcagcctcgaagcgatggcgcgcgacctggaccaggacgaggtcctgcgcctgcgccaggacggtgtgatacagccgctcgaatccctcatgcaggaagccctggggcgttaccccggggcgcgcctgctggaggtcgagctggaagaggaagacgacgtgtatgtctacgaggtggagctgctcacccgcgacggcgtcgtgcgtgaactggaactggatgcccgcaacggccgcatcctgaaggacgaggaagacgactgatgcggttgctgctggttgaggatcacgttcccctggccgacgaactgatggccagcctgacccgccagggctacgcggtggactggctggccgacggccgcgacgcggcggtgcagggcgccagcgaaccctacgacctgatcatcctcgacctcggcctgcccgggcgtcccggcctggagatactccaggagtggcgtgggctgggactcgcgactccggtgctgatcctcaccgcgcgcggttcctgggccgaacgcatcgatgggctcaaggccggtgccgacgactacctgaccaagccgttccatccggaagagctggccttgcgcatccaggccctgttgcgccgcgcccatgggctggccaaccagagccagctggaggccgccgggctgcgcctggacgagcagcgccagtgcgtgtgcctgaacggcgccgacgtcgacctgaccgccgccgaattccgcctgctgcgctatttcatgctgcaccccggccaggtcctgtccaaggggcacctggccgagcatctgtacgacggcgagaccgaacgcgattccaacgtcatcgaggtccacgtcaaccacctgcggcgcaagctcggccgcgaggtgatcgagacccgccgtggccagggctaccgctacgccggggtggccgccggatgaggtcgatccagcggcgcctgagcgtcggcctgttcgcggtgctgctggtggtcgggctggtcctcgcgcagaccggcctgtggctgttcgaccagggcctgcggcgctatttcgccggcaatctgcgcgaggaggcggagaacctgctggtggccatggtgcgcgggccgaacggcatgcaactggacgagcaacgcctcaacccggcgttccagcgcccgtattccgggcgctatttcgtcatcgagctggaaaaggacacctggcgctcacgctccctgtgggacagcgagctggaagtgccgcacaagaaagggctggtgcagggcctggtcgatgggcccgaggagcagcgactgctggtgttccgcggccactacaagcgcatgggccagaagctgcggatcgtggtggcgcaggactatacgccgatcctggaaagcttcgcccgtgtgcagtggatgggtctgggcgccggcgccctggcgctgctcctggtattgctgttgcagcgcctgaccgtgcgtcgttcgctgcgtccgctggaggaggtgcgcctgcagatcgcccagctgcagcagggccagcgtagccaactggacaaccaggctcccgaggaactggagccgctggtggagcagatcaaccacctgctggcgcacaccgaggagaccctgaagcgttcgcgcaacgccctgggcaacctcggtcacgccctgaagacgccgctggcggtgctggtcagcctcgccgagcgcgaggagatggcgcgccagccggagttgcaacaggtcctgcgcgaacagctggaacagatccagcagcgcctcggtcgcgagttgggcaaggcccgcctggtcggcgaagcgctgcctggcgcacatttcgattgcgccgaggagttgccgtcgctgtgcgacaccctgcgcctgatccacggcccgcacctgcaggtgagctggagcgcgccaccggggctgcgcctgccatgggaccgcgaggacctgctggagatgctcggcaatctgctggacaacgcctgcaagtgggccgatagcgaagtccgcctgactgtcgcgcagggcgagggcatggtccgcctgaaggtcgacgatgacggccccggcatcctccccgaccagcgccaggcggtgctcgagcggggtacccggctcgacgagcaggtcagcggccatggcctgggcctgggcatcgcgcgcgacatcgccgaggcctgcggtggccgcctgagtctcgaggacagcccgctgggcggcctgcgggtgagcgtcgagttgccgttgcagaagagcggccgcgccgccagggcttaacagttcttcaccatttgccgacagtcccggcaagatttcctcctgcgctttccctagcatcccgggcttcttgcaaggaggtcttggacgatgaaacggcggacgggtacgggccgctggcgctgggcgctgatgctgccggtgctggtgttcctgttgggcgagtccagtggacagcgagaggaggggcggtcgccgcggttacccgcgcaggctcgctacgagcaggccgtggaaaacgcgttgcgcagcgagcgcggcgagccgcgacaggccgggacagcggcagcgaaggtggccgaggcgggagccccggcgcgtctgcgtggctggctgcgctcgctggcccgcctggcgatctgggggacctacggccccccggcgctattcaggccgtgaacggtcaggccttgaactgttccatcaggccctgctggtggttggccaggcggttcagcgactgactgacctgggccgattcctcggcctggcttgacagcgactcggtgacgtcacggatcgccgcgacattgcggttgatctcctcggctaccgagctctgttcctcggcggcgctggcaatctgcaggttcatgtcgttgatcaccgtcaccgcctcgccgatccgttgcagcgcggccaccgcttcatccacctgctcgacgctgccctgggcctggcgatggctgccatgcatggcgtcgaccacgtcgcgggtgccctgttgcaggccttcgatcaccccgcggatctgttccaccgagtcctgggtgcgccgggcgaggttgcgcacttcgtcggcgaccaccgcgaagccgcggccggcgtcgccggcgcgggccgcctcgatggccgcgttgagcgccagcaggttggtctgctcggcgatggcgcggatcacttccagcaccgaaccgatttcctcgctgctgctggccagttgctcgacctggcccatggcgctggtcaggttggcggccaggctgtcgatgctctgggtggtgcggtcgatcagcgccaggccgtcgcgggtcgcctggtcggcaccgcgcgcggcgtcggcggcctgggcggcgctacgggcgacgtcctgggcagtggcggtcatctcgtgggatgcggtggcgacctggtcgatctcgcggaactgctgctgcatgccggcgctggtctggctggaaatcgccgccgactggtcggcggtactgcgcgcatcgcgcaccgagaccttcacgtcgcggatgatcggctgcagcttgtcgagaaaacggttgaaccaaccggccagttcgcccagctcgtcgcgcccggtgtgcggcagacgctgggtcaggtcgccttcgccgctggcgatgtcgcgcagcatgtgggcgacgccgaggatcggccgggtcacgccgcgggcgctcagccacagcaccagcaggccgagcaccgcggcgccgaggccgaggcccagttcgacccaggtgccttcgcgacgcatgtcgtccagttgccgctccagcgccagggccgggccgagcagggcgctcttcggcacttcgaggagcacgccccagggcttggcgccgggaatcggctgcaacggttgcagcaccttgaggtcgtcgttctcgttgaacaaccggctcttgccggcggccagcagttgcaggagttcgccggcgtgctgcggatccgccttggccaggttcttgccgagcaggccggcgtcgcggctgttgccggcgaacagcccggccgggctgaggatgccgacctggccgacgccgtcgtagagttcgcggttgccctgttcgctgagcgcctgcaggttgctcaggttgatgtccaggcccatcacgccgatcaccttgccatccagttcgaggggaaaggcgatgctggtcatcagcagttggcgttcgccgaccttgtcgaagtaaggatcgagcacgcagggttgcccgctttccttcgggcaggtgtaccaggcgttgtaggccgcgccgctgggcccgctgctggtgtcggcgagttcggactcgatcatcgactcggattccagctgtcccggcgtggcctgcgcccagtacagggagaagcgtcccttgtcgttgctgcccagggcgggctggtcgacgaacagttcgtccttgccgtccagcgcattgggttcgaagaccacgtacaggccgagcacctcgggattggcggcgagcgcggtgcgcacctggcgggtcaggtcttcgcgcaggtcgtaggcatcgaggaagcgcttctgcgcctggtcgcggaggaacaggatctgccgggagaagcccttgccgtactggaaggcatccatgaaatagcgctggatgcgtaacgcctgcaattccccgcgggcttccaggcgcaggcgcgccgattcgtcgagcatctgcgtactggcgcttttcaccagcacgctgctgtgctgcatgcggtagaccgaaaggccgaccagcaaggcgaccacgccgagcaggcagagccctgccagcagggtgatcttccattggatggacaggcggcgaaggaacatgggaggggtccttgtacgaagaaactgcgggggcccaaggcttatcggcagggctcgcccattcttgacgacggtccggtcgctggcgccggattgccgtcgttcggcgaatcgcacgcaagaaccgtgcacaacggtttatagccaggcgacattcgcgcatgcgcggctttgacaggcggggatggctgtagcagagtacgccccttttttcggccgcagacggtcgagttcgtttcatttgcaaggagttcaacgatgaacgcagtggtgctggcggtggggctgatgctcgtcctcagcctttgccgtgtgcatgtcgtgctggcgctgatcatcggcgcggtggtcggcggactgttcggtggcctaggcctggaggggactctcaaggccttcaacggcggcctcggcgggggtgccacggtggccctgtcgtacgccatgctcggcgccttcgccgtggccatcgcccgctccggcgtggcccatgcgctggccgacaaggtcctggcgctgctcggccggcacgacgagcagggcaagggcgccggtgcgttcaagtggatcctggtcggcctgctgctctgcgtggcggtatcctcgcagaatatcctgccgatccatatcgccttcatcccgctgctggtgccgccgctgctctatgtgctgagcaagctgcagatcgaccggcgattgatcgcctgcgtcatcaccttcggcctgatcaccccgtacatgttcctgccggtgggcttcggcaacatcttcctcaatgaaatcctgctggccaacgtggcgcgcaacggcgtcgacgtcagcgggatcaacgtcacccacgccatgttcatcccagccctgggcatgctcgccgggttgctcatcgcggtgctgttcagctaccgccgcaagcgcgtctacgacttgcagcggatcgagcaggccgaacgcgtcgatgtcagctacaacccgaagagcctggcggtggccggggtatccatcgtcgccgcgttcgtcgcacagctgtggctggactcgatgatcatcggcgcgctggtcggtttcgtggtcttctcgctgtccggcgtggtgcgctggaaggagaccgacgacctgttcaccgaaggcatgaagatgatggccaccatcggtttcatcatgatcgccgcggccggtttcgccgaggtgatgaaggccaccggcgaggtgcagagcctggtcgacgcctcggtggcctggatcggcaacagcaaggcggtcggcgccatgctgatgctgctggtcggcctgctggtcaccatgggcatcggctcgtcgttctccaccgtgccgatcatcgccgcgatcttcgtcccgctggcggtgcaactgggcttcagcccgctggccatcgtcagcatcgtcggcaccgccggcgcgctgggggatgcaggttctccggcgtcggactcgacccttgggccgacctccgggctcaacgtcgacggccagcacaatcacatctgggacaccgtggtgccgaccttcctgcactacaacctgccgttgctggtgttcggctgggccgccgcgatgttgctctgagttccatctcgggcggtcgcctgacggaatgtcgggccggccgcttaagcttccgacgggattgccgatgaaacgggaatcccgttttttattgggcgtcatgctaggagttgatgatgcgtctgaccctgaaatccaaagtcctcctgctggccatggtgccggtgctgctcttcgccctggtgctcagcggcggagcggtgctgatcctgaaaaaacaggctgatgccgaagtcaaggatacccgcgagcgcctgctcggcgaccgtcgtgccgaactcgagcactacgtgcagatcgccatgggcagtatccaggccgagtacgaccgctcggccaacggcgacctgaatgcccgcgccgaggccatcgcgcgcctgtcgaagatcaagtacggcaaggacggctatatcttcggctacgactcccaggtggtgcgcctgtttcgcggcgacagcccggtggacgtcggcaagagcttccgcgaccgccgcgatcccagcggcgtctacctcaaccgcgaactggtggaggccggccgcaacggcagccactacgtgacctatacctcgccgctgccgggcaacgagggcgtcatggtgcccaagctgtcctataccctgtacctgccgaagtgggacatggttatcggctcggcgatcaacctcgacggcgtcgaggcccagttggtggaaatcaagcaggacatcgacgagcgtatcggcaccctgatcgccagtatcgtggggatcgccggcgtccttctggtggtcctgctggtgatcggcctggcggtggccaacgcgatgctgcggccgttgcaccagatccgccagaacctcgatgacatcgccgccggcgaaggcgacctgacccgtcgcctaccggtgaccagccacgacgagctgggcgagctggccggttccttcaaccgcttcgtcgagaagatccacggtctggtgcggcagatcgccgggatgaccggcgacctcaagcaactggtggagcagatgtcggcccaggccgagcgttccgagcaggccatggagcgccagcgccacgagaccgaccaggtcgccaccgcgatcaacgagatgtccgccgccgcccatgaagtggcgcagagcgcccagcgcgccgccgaggccgcgcagcagaccgaccacgaaggccaggcggccaagcgcgtggtggacggcagcatcgagcgcatccacgcgctggtggacgagatccgcgacagcgggacttctctggatagcctgcagcaggacgtgcaatccatcgtcagtgtgctcggggtgatccgctccattgccgaacagaccaacctgctggcgctcaacgcggccatcgaggcggcccgtgccggcgaggccggacgtggctttgcggtggtcgccgacgaagtgcgggcgctggccagccgcacccagcagagtacccaggaaatccagggcatgatcgatcgcctgcagcagggcaccaacgccgcggtcgacgccatgcgccgttccggcgaggccggcgagggcaccagcaaccaggccaaccaggccggcgattcgctggatgccatcgcccagctgatcgccaccatcaacgcgatgaacgcgcagatcgccagcgccgccgaggagcagaccgcggtggccgaggagatcaaccgcagcgtgcaccagatcgccggcgcggtggacagcgtcgccgacgaggcccagcagggcgcgcagaccgcccgcagcctggcgcaactgggccagggcctgggccggctggtcggtcagttccgcatctgacccttcccccgcgcgaccgctgccggcaaaagagccagccggcagtggtgcgccacagagccttcctgtcattattcggcggagtcggccggcagtcgtgaacgatccacgtccgccggctgactaatgctttgcttcccactgccagatggattggacatgctcgacacgaaactggaatcccggacttttctcctgttgctggcggtggtcacgctcgccttcggctggctcttgctgccgttctacggcgcggtgttctggggcaccatcctggcgatcatcttcgccccggtgcaacgccgcctgcaggtgcgcctgagggatcggaagaacctcgccgcgctgatcaccctgctgatctgcgtgctgatcgtgatcatcccggtgatcttcatcgccggttcgctggtgcaggaaggcgcgagcgtctaccagcgggtcaagtccggcgaactgaacttcgccgcctacctgcagcaggcggtggctgccttgccgccatcggtgcaccagtggctggagcgcttcgacctggccaatctctcgagcctgcaggagaagctctcctcggtggcgatgcaggccagccaggtggtggcgaccaaggcgttcagcatcggccagaacaccctcgacttcgtcatcagcttcggcatcatgctctacctgctgttcttcctcctccgcgacggtcgcgtgctcggccggcggatcaagcaggcggtgccgctgagccaggaacacaagcaccacctgttcgccaagttcaccacggtgatccgcgccacggtgaagggcaacatcgccgtggctgccacccagggcgctctcggcggcctgatcttctggctgctgggcatcgagggcgccttgctctggggcaccctgatggccttcctgtcgctgctgccggccatcggtgcggcgctgatctgggcgccggtggcggcctacttcctgctcaccggggcgatctggcagggtgtagtgctgatcctgttctgcgtggtggtgatcggcctggtggacaacatcctgcgcccgatcctggtcggcaaggacaccaagatgccggactacgtggtgctgatctccaccctcggtggcatggccttgttcggcctcaacggcttcgtcatcggcccgctgatcgctgcgctgttcatggccagctgggacctgttcactggccgcgaggaagaaccgcaggcctgagtcgcgcccgtggcagacaagccccgcgaatgcggggcttgttcgtttcaggccttgaagcatcatggacggcgctgtcgtggctgagccgctccaggcagtgcctggggccttcggctaacagtgcgtcgaacccggtacatcgcgaccgttgcgcaactggacatggagcagcgcttgccggcactcctcagggctcgtcgctgtcaaccggcggcggacctcggcttgagcgcgcaggtggcgaggaaggtcggcacgaagcggtcgatgacgaagcgcgggtgcggttgccagtcttcgtagaaatcctgcagcagcaggccggcggcgagctggccggcgatctgctgggtcaggctatggccgaacaccagggcttcgcctttctcgcgctttgccgcgagggcttcggcggagaggctttccaggtcggagtagggcaggcgatgtcgcggccggatcaggccctgctctgccagttccggcgagcggtcctcgatgaacagcgccgggttgtagaagctcgccagcagcttgccgcccggccgcagcacccgcgcgcattcgcgccagaccggcaggacatcgtcgacgtagagattggagatgggattgaagaccaggtcgaaggaggcatcggcgaaggtcgagaggtcgcgcatgtcgccctgcacgcaggccagttcgaggcggtcgcgggcggcgacctggcggtccttgtccagctgtcccgccgaggcgtcgaacagcgtgacccgtgcgccggcggcggcaaggatcggcgcctgctggccgccggccgaggccaggcagaggatctcgcggccgcgtacgtcgcccagccagtgagcgggtaacgcgcccggggtcagcttcaccgcccagtcgccgcggcgtgcggcggcgacctcttcggcgctgaccggtcgcgaccattcgcagtcccgggcggcctgggcgtcccaactggcgctgttgtgtcgcaggacgtcgatatcgtggaaggtgggcatgaggcctccgggttcatccatggagcgcggagcatgccacggcagcggggcagggtgcgtggggcgggccaaagaaaaaccccgccgaggcggggttttcgtggagcgggcgactcagccggcgagggccaggccggaatgctggaggatttccagcagcggctgcgggtagacgccgaggaagaacgccagcagggcgatggccaccagcatgatgccgccggcgcgctggccccagttgaacggtgcgtcgtgctggcggatgccgggctcgaccaggaacagggtgaccatgacccgcaggtagtagtacaggccgatggcgctgcccagcaccagggcgccgatcagccaccacaggtgcgactcgacgccgaccgcgatcacgtagaacttgccgatgaagccggcggtcagcgggatgcctgccagcgacagcatcatcacggtcatcaccgcggtcagtaccggccggcgccagaacaggccgcggtactcgaacagcgcatcggcgtcgcggccgctgtacggggtggacatcagggtgatcacgccgaacgcgccgagggaggtcagtacgtaggtggccaggtagacgccgaccgcttccacggccatgcccttgctggcgatcagggcgaccagcaggtagcccaggtgggcgatggacgagtagccgagcaggcgcttgatgttgctctgggtcagtgccagcaggttgccgaagaggatcgaggcgaccgcgatgacgctcagggagatgttcagcagttggttgtccagggccgcaggggcgatctggaacagccgcagcagcacggcgaacaccgcgaccttgctggcggtggcgaggaacgccgagaccggcgccggggcgccttcgtagacatccggggtccacaggtggaagggcaccagcgacagcttgaagcccaggccgaccagcatcatgcctacgccaacgctgaccagcggaccgctcagcacgtgctcggcgaccttggcgccaaggccggcgaagcccagggtaccggactcggcgtagagcagggccatgccgaacagcaggaaggcggagccggcggccgagagcacggtgtacttgatgccggcttccagcgagcgcttgttgaagaaggcgtaggcgaccatcccgtagaccgggaccgagagcagctccaggccgatgaacaggctggccaggtgctgcgcgctgaccagcaccaggccgccggcggtggccagcagcaggagcaggtacagctcttcgcggttacccggatagctttccatgtaggcgtgggcgagggtcacgcaggccagggcggagaccagcaccagggccatgtagaagcaggcgtagttgtccaccagcaccagcggtgtcacctcgatcggggtgacgccgaggaccggcagcagcgacagcagggccaggttgaggccgatcaccgagagggtggcggtgaacgagtgattgcgtttccaggctaccgccagcatcaccaccaccagggtggcgctggtgatcagcagtggcaggagcgcgatgaagtgttggatcgtaaaggtcatttcgcgactaccgtcctgcaagggtggaaagggctgcgcccagccattgctgcacgccgtgcatgctggccgcggagatgtccagcactggctgcgggtagaccccgagcaggaccagcaggaccgccaggccgagcaccatgctcagttcgcgggcatcgaggccgaggatcggctcgtcggactggctggggccgaagtaggcgcggtggatcatgatcagcgagtagaccgaggcgaagaccaggccgaaggtggcgatcacgatgatcaccgggaccaccttgaaggcgccgatcaggatcaggaactcgccgacgaagttgccggtgccgggcaggcccagcgacgccgaggcgaagaacaggctgatcgccggcaggtagggcatgcgcgaccacaggccgcccatcttgcgcatgtcgcgggtatgcaggcgctcgtagagctggccgcagaggatgaacagcgccgcggcggagaggccgtgggcgatcatctgcaccaccacgccctgcagcgcgacctggctgccggagtagatgccgatcatcacgaagcccatgtgcgaaacgctggagtaggcaaccaggcgcttgatgtcggtctgcgcgaaggacagcagggcaccgtagaagatgccgatgatgccgagccacatggcgatcggcgcgaattccgccgaggcgttggggaacagcggcagggcgaagcggatcaggccgtaggcggcggtcttcaggaggatgccggcgaggtccacggagccggcggtgggcgcctgggcgtgggcgtccggcagccaggaatgcaccggcaccaccggcatcttcaccgcgaaggcgacgaagaagccgagcatcagcagccattccacgtgggggctcagctgggtcttcagcagggtggcgtagtcgaaggtgatcacgccggtggcattgaagttgacgaacaccaggccgaggatcgccaccagcatcaccaggccgctggcctgggtgaagatgaagaacttggtggcggcgtagatgcgggtcttcttgccgtcatcggaactgtgtccccacagcgcgatgaggaagtacatcggcaccagcatcatttcccagaagaagaagaacaggaacaggtcgatggcgaggaacacgccgatcacaccgcccaggatccacagcaggttcagatggaagaagccgatgcggcgctggatctcgttccaggagcagaggaccgagagcacgccgagcaggccggtgagggcgaccatcagcagcgacaggccatccatcgccaggtggatgctgatgccgagacgctcgatccacagcaccttgaattgcagggtccattccggctcgccgccgggcgcgggcgccagctggaagtcgccggtggcccagatccacaggctcaggatcaggaccagggtcatcgaaagcagcgcgatccagcggggcagggtcttgctgctgtgttcggcgatccagcagaggaaaccgccgatgaaggggatcaggattagccagggcagaatcatgacaggctcagtctctccgtgaattcgttaggccagcagcagcgcgccgagcagtatggcggcgccacccaccagggaagcggcgtaccagcgcaggcggccgttctcggtgaggctgaggaggttgtgtccgccgcgcacgctgaacggaacgacgcccagggtacggtcgatggggtcgcgccccagcaattggcagagcagcaggtagggtttcacgaacagcttgtcgtacagccagtcgaagccccaggcgtggtaccaccaggtaccgaagaagcgacccggggcgctcttcgccagggcgctgacgaagcggcgctggccgaggaagagcagggcggccagcaggataccggcgatggcgatggcacccgaggccagttccaggctgtgcttggcttcgccaccggcgtggccgacgctttccggcaggacgccagccagcggcggggtgatcagggcgccgacgaaggtcgacaggacgatcagcacgctgagcggcaaccagtgggaaatcccgtggccggcgtgggcttcggtcttcggctcgccgtggaaggcgacgaagatcaggcggaaggtgtagatcgaggtcaggaacgcacccaccaggccggcgatcagcagttcgcgatggccgctggcgaaggcctcccagaggatctcgtccttggagtagaagcccgcggtgaggaagggcagggcggccagcgccgcaccgccgaccacgaagctggcgtaggccagcggcagcttcttccacaagccgcccatcttgaagatgttctgctcgtggtggcaggcgacgatcaccgcgcccgaggcaaggaacagcagggccttgaagaaggcgtgggtcatcaggtggaagatcgccgcgtcccaggcgccgacgccgagggcgaggaacatgtagccgatctggctcatggtcgagtaggcgaggatgcgcttgatatcggtctgtaccagggcggcgaagccggccaggaccaaggtcaccgcgccgacgatgccgaccagttcgaggatgtccggggccagggtgaacaggccgtggcaacgggcgatcaggtagacgccggcggtcaccatggtggcggcgtggatcagcgcggagaccggggtcgggccggccatggcgtcggccagccaggtctgcagcggcagctgggcggacttgccgaccgcgccgccgagcagggccagggtcgccagggtcagccagaggttgccttccgggaacttctgcggcgccagcaccagcagctcctggatgttcagggtgccgaactgctggaacaggatgaacaggccgaaagccatgaacacgtcgccgacgcgggtgacgatgaatgccttgagcgccgcgttaccgttgttgcgattgctgtagtagaagccgatcagcaggtagctgcacaggcccacgccttcccagccgaagtagaggaacagcaggttgtcgcccagcaccaggaacagcatgctggcgatgaacagattggtgtaggcgaagaagcgcgaatagccggtttcgccacgcatgtaccaggaggcaaacaggtggatcaggaagccgacgccggtaaccacgccgagcatggttaccgagaggccgtccaggtacagggtgaagttggtgctgaagtcgccggccgccatccactgccacagcaccaggctgtaggcaccgccttccggcggactgctgtggaagctgaagatggcccaggccgcgctcagggcggagaggccgaccgagccgacgccgaccagcgccgaaaggttttccgaccacctgccgcgggagaacgacagcagcaggaagccgaccagggggaacaggaaggtaagaggtagaaggttcatccgcgcatctcgctggcagcgtcgatatcgagggtgtggaagcggcgatacagttgcagcaggatcgccaggccgatgctcgcttcggcggccgcgaggctcagcaccaggatgaacatcacctggccgtcgggttggccccagcggctgccggcgaccacgaaggcgagggcggcggcgttcatcatcacttccaggctcatcagtacgaacaggatgttgcgtcgcaccatcaagccgaccagtccgagggcgaacaggacgctggcgagggccaggccgtgttccagtggtattgcgttcatagcgttacgttcccttggggcgggcgcagggcgcccgccgaacctttattgtttggcgtcttgacgacccaggtgataggcagcgaccagggccgcgagcaacagcatggaggccagttcgaccaccagcaggtacgggccgtagaggctgatgccgaccgccttggcgtctaccgtggtatggccgatgccggcaccgctcggggtgcgggcgaggaccaccagcagttccaccagcaggaccagggccagggccgaaggcccgacccagatgccgggcgtgagccacttgcgctcctgctcgaccacggccgggccgaggttgagcatcatcaccacgaagacgaacagaaccatgatggcgccagcgtagacgatgatctccagggcaccggcgaagggtgcgccgaggctgaagaaggtcatcgagatggccagcagggaaatgatcaggtagagcagggcatgcaccgggttgctgttggtgatgacccgcagcgtggccagtacggcgacgccggcagcgaaatagaaagcgaattccacgcgacgtctccttatggcagcaggcttttcacgttgatcggttcggcttcgttctgcgcggcgcctttcggcttgccggcgatcgccatccccgcaacgcggtagtagttgtagtccgggttcttgcccggcccggagatcagcaggtcgtgcttctcgtagaccaggtcctggcgcttgaactcgcccatctcgaagtccggggtgagctggatcgcggtggtcgggcaggcttcctcgcacaggccgcagaagatgcagcgcgagaagttgatgcggaagaactccggataccagcgaccgtcctcggtctcggccttctgcagggagatgcagccaaccggacaggccacggcgcacaggttgcaggctacgcagcgttcctcgccgtcggggtcgcgggtcaggacgatccggccacgatagcgcggcggcaggtagaccggctcttcggggtattgcagggtgtcgcgcttgcggaaggcatggccgaagatcatcaccaggctgcgaagctgggtgaaggtgccatgcacgacgttgatgatttctttgatcacggtggttctccttactgggccgcggccagcacgagcgcgccggtcaccagcaggttgatcagggtcagcggcaggcacaccttccagctgaacgccatcacctggtcatagcgcggacgcggcagcgaggcgcggatcaggatgaagagcatgatgaagaagccggtcttggcggcgaagtagaagaacgacagccagggcagggtgtccaggaacggaccgtgccagccgccgaagaacagggtcgccagcagcgccgagaccagtacgatgccgatgtactcgccgacgaagaacatgccccatttcatcccggcgtactcgatgtggtagccgtccgccagttcctgctccgcttccggctggtcgaacgggtgacggtgggtcacggcgacgccggcgatgatgaaggtgcagaagccgaagaactgcggaatgatgaaccagacgttgtcgatctggtactggacgatgtcgcgcatgttgaacgagccgacctgggcgacgatgcccatcagcgacagggccaggaacacctcgtaggagatggtctgggccgaggcgcgcaggctgccgagcagggcgaacttgttgttgctcgaccagccggcgaacagcacggcgtacaccgtcaggccggccatggcgaagaagaacaggatgccgatgttcaggtccgccacgccccaggtgggggtgatcggcacgatggcgaaggcgacgagcagggcgcccatcgcgattaccggggccagggtgaagatcatcttgtcggcgaacggcggggtccagtcctccttgaagaacatcttgaccatgtccgcgccgagctggaacgcaccgaacggaccgacccggttggggccatagcggtcctgccagaggccgagcaggcggcgctcgacccagcttagcagggcgccgcagatgaccacggcgagcagcaccacgatggccttgaccacggtgaggatgatggtgaccagagcgggagtcagccaactcattgtgcagcctcctgcagaccttccacggagcagccggcgatcgccgccgggatgccggcgaagccgaccggcaggccgatcaggccggcgccgagttgttcatcgatgcgcagcggcaggcgcagggcctggcccttgagctggaagccgagggtcgcgccgtcgttgacgccgaggcggtccgcgtcttccttggacagggcgacgtaggtctccgggatgcgctgctggatcggcgcggcccgcgagctgttttcctcgctgccgaacaggtggtacagcggcactaccttccagctgtcggccttggcgctgaacggcaccggcacggcctggaaccagtcgaggccttcgcccttcggttcgatcaggcgcacgccggggtcgccggcgcgcaggtggccgccgacctcgtcctggaacttgttccaggcctgcggcgagttccagcccggcgaccaggcgaacgggatctgctgacggtcttcctggctgccggagtagccttccatggagaaggcgaacgccgagtcgatgtcctgcggggtgcgcggctcgtgcacgctgatattggcgcgcatggcggtgcgcccgctgtagcggtgcggttcgcgggccagcttgaggcccttgatgcggaacgaggcggccggtgcggcgtcgcggatgccggccaggatcggcttggcctcggccacggcttcggtgacgtggtccaactgggtccagtcgacgcgcttgccttgcagggtgctgtggatcgcatgcagccagcgccagccctcgcggaccatgttcctggcgtcgtagtaggtcgggtcgaacacctggaagaagcgctgggcgcggccttcctggctgaccagggtgccgtcgccttcggcgaagctggccgccggcagcaccaggtgcgccttggcggtggtggcggtctgctggtgatcggcgacgatcaccaccttggccgccgccagggccgcgtcgacacgggcggcgtcggtgcggcgatagagatcgttctccagcaccaccacggcgtcggcctgtccggaggtcagtcgctcgagcgcggcttccacggagtcgccgccgaagagcgccaggccgaggctgttggcttcgccgaccaccaggctgatggaaccgttcttctcgcgctgcttgagggccttggcgatgttcgccgcggcttcgatcaatgccttgttgcccagcgagttgccggacactaccagcggacgcttggccgccagcagggcatcggcgatgcgctgggcgaaggcctgggcctgcgggtcgaggtcggccacggacggggcgcttgggtcgatcgcgtgggccacggcgaagccgaggcgagcgagatcgtccggcgcggcgtgaacggtttcctcggccacgtcgtcgaggcgggtcgcgctgacgctggcgatgaacagcgggttctgcgcatgctgggcgatgttcttcaccgcggcgtcgagccacggctggaccttcatgtcggcagccatctcgacggccttgcccttcaccgactggcgcagggccagggcgatgcgggcggcggtctgggtcaggtcctcgccgaggacgaagaccgcgtcgtggtcctcgatgtcgcggatgctcggcaccggcagcgggccttcctgcatgacctgcaggatcaggcgcaggcggtcgagctcgccttcgttgatgccgctgtagaagttgccttcgccaaccagctcgcgcagggcgaagttgctttccaggctggcgcgcggcgaaccgatgccgaccaccttgcgctccttcagcagggcggcggcctggtcgagggcgccgtccaggctcagcttctgcttgctcagcaccagcagcggctggcgcggacggtcttcgcggttgacgtagccgtagccgaagcgaccgcggtcgcagaggaagtagtggttgaccgagccgttgtagcggttctcgatgcggcggatctcgccgtagcgctcgccggggctgatgttgcagccgctggagcagccgtggcagatgctcggggcgaactgcatgtcccacttgcggttgtagcgctcggagtgggtcttgtcggtgaacacgccggtggggcagacctcggtgaggttgccggagaactcgctttccagcacgccgtcctcgacccgtccgaagtagacgttgtcgtgggcgccgtagacgccgaggtcggtgccgccggcgtagtccttgtagtagcgcacgcagcggtagcaggcgatgcagcggttcatctcatgggcgatgaacgggccgagttcctggttctggtgggtgcgcttggtgaagcggtaccggcgctcgttgtggccggtcatcaccgtcatgtcctgcaggtggcagtgaccgccttcctcgcacaccgggcagtcgtgcgggtggttggtcatcagccattcgacgacgctggcgcggaactgcttggcctcttcgtcttcgatggagatccaggtgttgtcggtggcgggggtcatgcaggacatgacgaggcgaccacgcttgtcgttctcgtcggtgtactgcttcaccgcgcactggcggcaggcgccgacgctaccgagcgccgggtgccagcagaagtagggaatgtcgagaccgagggacagacaggcctgcaggaggttgtctgcaccatcgacttcgagcgtcttgccgtctacgtggatagtggccatggttcaagtcttcgttggcccgttgtcagcgggcgtggctaatagaaactcacggttccgtcgggcctgcggccgggccgcggcacgacgacgaaacatcgccggacggctggccgtccggctgcaaagcatcaggcgccgaccgttgccgggcgcggcgcggccgaaggctggcgggagatgcccgcctcgaattcggcacggaaatacttgagggcgctgcccagcggctcgacggctcccggcgcgtgggcgcagaaggtcttgcctgggccgaggaagttgaccagctgctcgagggtctcgaggtcgccgggctggccttcgccccgctccagggcgcgcagcagcttcacgctccacggcaggccatcgcggcagggggtgcaccagccgcaggactcgcgggcgaagaactcttccatgttgcgcagcagggaaaccatgttgatgctgtcgtccaccgccatggccaggccggtgcccatccgggtgccgaccttggcgatgccgccggcgaacatctgcgcatccaggtgctccgggagcaggaagccggtaccggcgccgccgggctgccaggccttgagctggaagccgtcgcgcatgccgccggcgtagtcctcgaacagctcgcgggcgctgacgccgaacggcagttcccacaggccggggttcttcaccttgccggagaagcccatcagcttggtgcccatgtcttcgctgccggggcgggccagggtcttgtaccagtccacgccgttgccgacgatggccggcacgttgcacagcgtctccacgttgttcacgcaggtcggcttgccccagacgccgacggcggcagggaagggcggtttggaacgcgggttggcgcggcggccttccagcgagttgatcagcgcggtctcttcgccgcagatgtagcggccggcaccggtgtggacgaacagctcgaaatcgaagccgctgccgaggatgttcttgccgagcaggccggcggccttggcttcgtcgatggcgcggttgaggttgcgcgccgcgtcgacgtattcgccgcgcaggaagatgtagccgcggtaggccttcagcgcgcgcgcggaaatcagcatgccttccaccagcaggtgcggcagctgctccatgagcatgcggtccttccaggtgttcggctccatctcgtccgcgttgcacagcaggtagcggatgttcagcgactcgtccttcggcatcaggccccacttcacgccggtggggaagcccgcgccgccgcggcccttgaggccggagtccttgacggtctggacgatgtcgtcctgggccatctgggtcagcgccttgcgcgccgcggcatagccgtccttgctctggtattcctcgagccagacgggctgggcgtcttcgcgcaggcgccaggtcagcggatgggtttccgccgaacgcgtcatgcggttggccggaccaatggaggtaagggtcatacgtaggcctccagcagtttggcgacaccgtcgggacgcacgtcgccatgggtgtcgtcgtcgatcatcagcgccggggccttgtcgcagttgcccaggcagcagaccgggagcagggtgaagcgtccgtcggcggtagtctggccgagaccgatgccgagttgcttctggatctcgccgaccaccgactcgtggccgccgatgtagcagaccatgctgtcgcagacgcggatgatgtggcggcccaccggctggcggaatatctgactatagaaggtggcgacgccttcgacgtcgctggccgggatccccagcacctcgccgatcgccgggatggcgccgtccggcacccagccgcgctgtttctggacgatcttcagggcttcgatggacgccgcgcgcgggtcctcgtagtgatgcatttcatgctcgatggacgagcgctcggtttcgctgaggacgaaacggtcggtctgaatcaggttgctctggctcatgtcagcggtccacgtcagccataacgaaatcgatgctacccaggtaggcgatcaggtccgcgatcatgctgccgttgatcaccgaggggatctgttgcaggtgcgcgaagctgggcgtccggatacgcgtgcggtagctcatggtgctgccgtcgctggtcaggtagtagctgttgatacccttggtcgcctcgatcatctggaaggcttcgttggccggcatgaccgggccccaggaaacctgcaggaagtgggtgatcagggtttcgatgtgttgcagcgtgcgttctttcggcggcggcgtggtcagcggatggtcggccttgtaagggccttccggcatgttcttcaggcactgttcgatgatccgcaggctctggcgcatctcgcccatcttgaccatgcagcggtcgtaggcgtcgccgttgtgggccagcggtacctcgaactcgaagttctcgtagccggagtaggggcgggccttgcgcaggtcgaagtcgcaaccggtggcgcgcaggccggcgccggtggtgccccactcgagggcttccttggtgttgtactgggcgacgccgatggtccggccgcgcaggatgctgttcttcagggccgcggtctcgtactcgtcgaggcgcttgggcatccagtcgaggaactcgcggaccagcttgtcccagccgcgcggcaggtcgtgggcgacgccaccgatgcggtaccaggccgggtgcaggcggaagccggtgatggcctcgaccaccttgtaggcgcgctggcggtcggtgaaggtgaagaacaccggggtcatggcgccgacgtcctggatataggtgcccaggtacagcaggtggttcaggatacggaagaactccgccatcatgatccggatcacgtcgacccgctgcggcaccttgatcccggcgagcttctccaccgagagtacgtagggcaggttgttcatcaccccgccgaggtagtcgatgcggtcggtgtagggaatgaaactgtgccaggactggcgctcggccatcttctcggcgccgcggtggtggtagccgatctccgggacgcagtcgatgatctcctcgccgtccagctgcaggatgatgcggaacgcgccgtgggcggacgggtggttcgggccgaggttgaggaacatgtagtcctcgttctcgccgtggcgcttcatgccccagtcttccggcttgaagcgcagggcttcctgctccaggtcctgcttggcggcggacagggagtagggatcgaactcggtggcgcgcgccgggtagtccttgcgcagcggatggccctgccaggtcggcggcatcagcatgcgggtcaggtgcgggtggccggtgaaggtgatgccgtacatgtcccacacttcgcgctcgtaccagttggcgttgggccagatacgggtggcggtgggcaggttgaggtcgcgctcggacaaggcgaccttgatcatcacgtcactattacgctccagcgacatcaggtggtagaacacgctgaagtcggcgctcggcaggccgcggcgatgggtgcgcagccgctcgtcgacgccgtgcaggtcgtagagcatcacgtagggcttgggtacctgacggaggaaggtcaggacttcgatcagtctttcgcgcgggacccagagcaccggcatgccggtacgggtgggctggacggtgaaggtctcggcgccaaagcgggaattcagttcgacgacgatatcctggtcgtctgccttgtaaggcgggatgtacagagcggagtctgcagtcatggtctcggtcgctttcggtcaacggtggggtgaacgcggctggtctcggccggccagcggggctggccgggagttccggatcacacttcgtcggggctgcgcaggttggtcacctggatgcgctgctcgcgtttcaggtctttctgggccggcatttcggcacggtagaccccctggtcgccaacgacccaggacagcgggcggcgctcctggccgatggattcctgcaacagcatcaggccttgcaggaacgcctccggacggggcgggcagccggggatgtagacgtccacggggaggaacttgtcgaccccctggactaccgaatagatgtcgtacatgccgccggaattggcgcacgagcccatggagatgacccacttgggttcgagcatctgctcgtagaggcgctggatgaccggggccatcttgatgaagcaggtgccggcgatgaccatgaagtcggcctggcgcggcgacgcccggatcacttcggcgccgaagcgggcgatatcgtgcggcgcggtgaaggcggtggtcatctccacgtagcagcacgacagcccgaagttatagggccagagcgagttcttgcgaccccagttgacggtggagttcagcacatcctcgagcttgcccatgaagatgttcttgtgaacctggccctcgaccagcgggtcggctacggtttcccgttcgcctatcgggtattggtcgttggccgcatcgggatcgatccgggtaagtttgtattgcatcgccaaagcctcattgttttagcttcgcctgccgcttgcgacggctttcgggagcccaatcgagcgcaccgatccgccaaagatagacaagacccgccaacagaattgctatgaaaatggttgcctcgatcaggccggcccagccgctttcgcgaaccgacaccgaccaggcgaagaggaagagggcttcgacgtcgaagatcacgaagagcatcgcgaccagatagaattttgccgagagacgcaggcgtgcgcctccggtggggacgatcccggattcgaagggttcgttcttgctgcgaccaaatgccttgctgccaagcagggacgaaacccctagcatgaaggcgagaaggccaacgacccctagaaggaaggcagcgaatccccagtgatgagctgcaagttcagctgggtttggcatgctgatactccttctgtaccggatatataagatcgtgggttctgggcgcaatgcccgacttcttgtgcaacccgctgcgtagtgagctaagggttgtatgtatctttccgattttatgcccaaagcgccggacaagtaaatttttctaacacaaacagacgcttctctgctttttccagcgctttggttaatccccgaaaccctcgtgaatgctgtctttgcgagaaatggcgcggcctggctggcttttggtcgtattgccgcgaagcgtggtggagggctctttgcaaggcttcaaacgataatgaatatcgtttgcaatgtcgcatccgtataacttcgctacatatattcttcgccgcgttactattgtttacccttttattggtaattactctcgcccaatccgttattgcattaaaccgggaatattctccgggccgggcgcatggcggtttttcttctttccgcaccatggcaacccggctgcggcgccgcctggggctgcgcccgcggttcttcgtgacggatgcgaaggcgctgggcaaggtttgcggcggttcgcttcgcagcgtagatgtagtcgctccggaggtgcgctacctgggggctgcggtagcgacccggggtttcttgccgacccaggcccagaccatttcgcaggcgatcggctggttgccgttctcgtcgctgaccaacaccgccacgcggacctcgcccttgtcctgttgccggatctgctcgatctgtccggcctccagcgtcgcgatggcggtcaggttgccctgggcgcgcttgagatagtcgatcttcatggtcttgatcagcggcagcttgtcgtccggtacgttcattccgaccaggaagccgctggccgactcggcgagcaaggccatcgccgcggcatggataccttttatgtggttctgcaccggtcgacggttcttcaggctgaggatggcgcgctcctgccccagttcatggatgcgcaccctcgccgtgccggcgaagcgcacctgggagcccagcagcagcgtcaggctgcggctgcgcaggcggcgggggaggagattgatggcgccgacggcgcggctgagacgattgcgcttgggcatgctggcgtccttccatagagaggggagcctgcattccacccgctttgcccgggcttgcccacggctgtagcggcgacctgcgccggcattccggccaacgcaggtcgtcgtggcgcgtcagagcaggcgtcggccgtcttcgcgggtgatcaccacggtggccgagcgtggccggcggcccggcccgtccggccaggtgctgaggaggttatcggcggtcgagccttcccccgggtgctggatgttgatgaacagcgtacggaagtccggcgtcgcggcaatgccggtcacctcgcaacccagcggaccggtgaggaagcgcttcagttcgccggtgcgcgggtcggccaccagcatctggttgttgccgaacgggccgctgctcaactggctgccgctcatgtcggtctggatccacaggcggccttccgggtcgaaccagaggccgtcggggctggccaggatattgtcctggttcagcggcttgccgtccgggccgcggctgtcttcgccgggaccggcgagcatgaacaggtcccaggtgaagcgttgcccggcatagtcgcggctgcgttcgcgccagcggatgatatggccgtaggcgttcttcacccgtgggttggccgcgtcggcgacggtgcgcgacgtgttgttggtgagggtaaagtagacgtcaccgttgtccgggttgaccgcgccccactccgggcgatccatcttggtcgcgccgaggacatcggcggccaggcgggtgttgatcagcacttcgccctggtcggcgaagctcaccccggccttgcgacaggccgcgcggaagttgccgtcggcgatgtccagcggcagccactggccgctgccatcggcgttgaagcgggcgacgtagagggtgccttcgtcgagcaggcgagtgttgctgcgacccggacggaacttgtcgcggctgacgtacttgtagatgtactcgttctgcgagtcgtcgccggagtagcagactacctggcggcccggcttgaccggggcgaagaccaggccttcgtgggcgaagcggccgagagcggtgcgcttgaccggcaccgattgcgggtcgaacgggtcgatctcgacgatccagccgaagttgttcggttcgttgcggtagtcgtcctgggcctgtttgcccttgcgggtggcgtcgaagcgttcgaactcgtcgcccgccagggtttcccagccgaaacggctggtgttgcgaatgccgtagcgggtcagttcgcgcggcagttcgctgtcctgggtggagaaatagccgacccagttctcctcgcaggtgaggtaggtgccccagggggtgaaaccgttggaacagttgttatgggtgccgcgggtgcgggtgccgtccggactgtggcgggtgcgcagcagttcgtggccgcgcgccgggccggcgatacgcatcggcgtggcggcggtgatccggcgatttcgttgcgacggcacgacactccactcgccacgcacgttgcgacggatctccacgacggaaacgccatgggcgttgatttccttgcgcacttcatcggcgacggtgcgcttgccatcgaccacggtcgggccattggtgtgcagcagcggcgcgtcgatgtattcatggttgagcaccagcaggccatggttgctgatgtgtccgccgccgaagccgaactgcgcgtcgatcgggaagaagtgcatgccgtcgtggtgcatgccgatctgttcggcctggtcctgggcgctgttgctggcgtcgtcgaggaagcccggataactgccgctgatcggggtgccccagggtatgaagggcgtcgccttgtagccggcgggcacccggatggtatcggcacggccgctggcgatggcttcgaagggcaagcggttgcggcgtttgaaaggcaagccgcgcaggccttccgcggcgggcacctgcgcttcggcgggagcggcgctggcggggagcgcgacgccgaggaaggcgagggcgccgagcgccgcgccgccggccaggacctggcggcggccgaggccggcgatcaggtcgttcatgtgcgggttgttcgaatggttgctgggcaactcgtcgccatcaccgaacaggatggcatcttttttctccaggctcacgggcgtgctccttgtgggctgatcgacggagcattgacgctaaccgctgaaagcgacgggacgatgacaggcactcgaggccttttgccatgatccggaaatgaaaaaccccggccggagccggggttttcgcgaggcgggccgggcagatcgtggctgcccggctggcccctgttccttagtggaactggttcatggtgttgtctttgccgctggccttcagagcggcttcgcctgcgaagtactctttatggttgtcgccgatgtcggagcccgccatgttctggtgcttgacgcaggcgatgccctggcgcagttcctggcgctgcacgcccttcacgtaggccagcatgccttcgtcggcgaagtagcccttggccaggttgtcggtggacagcgcggcggtgtggtaggtcggcagggtgatcaggtggtggaagatgccggcgtgggccgagccatcgcgctggaaggtgcggatcttctcgtcggcgaccttggccagctcggtgtcgtcgtactcgacgctcatcagcttgttgcggtcgtaggcggaaacgtccttgccttcggcgacgaacgcatcgaacacctgctggcggaagttcagggtccagttgaaggacgggctgttgttgtagaccagcttggcgttcggaatcacttcgcggatgcgatcgaccattgccttgatctggccgacgtgcggcttctcggtttcgatccagagcaggtcggcgccgttctgcagcgaggtgatgcagtccaggacgcagcgatcttcgccggtgcccttgcggaactggaacaggttggaagccaggcgcttcggacgcagcagcttgccttcgcgcttgatcacgacgtcgccgttgcccagctcggcctcggagatttcttcgcaatccaggaaggagttgtacaggtcgcccaggtcgcccggctcgttggtcacggcgatctgcttggtcaggccggcgcccagggagtcggtacgggcgacgatcacgccatcgtccacgcccagctcgaggaaggcgtagcgtacggcattgatcttggcgaggaagtcgatgtgcggaacggtgaccttgccgtcctggtggccgcactgcttctcgtcggacacctggttctcgatctggatgcagcaggcgccggcttcgatcatcttcttggccagcaggtaggtcgcctcggcgttgccgaagccggcgtcgatgtcggcgatgatcggcaccacgtgggtttcgaagttgtcgatctgggccagcagctcggcttccttggccttgtcgccagcggcgcgggcagcgtccaggccggtgaacagcaggtccagctcgcgggcgtcagcctggcgcaggaaggtgtacagctcttcgatcaggccggaaaccgcggttttctcgtgcatggactggtccggcagcgggccgaagtcggagcgcagcgcggcgaccatccaaccggacaggtagaggtagcgcttgttggtggtcttcaggtgcttcttgatcgagatcagcttctgctgcccgatgaagccgtgccagcaacccagcgactgggtgtagacggaggagtccgcatcgtattcggccatgtccttgcgcatgatggccgcggtgtacttggcgatatccaggccggtcttgaagcggttctggatacgcatgcgagctgcgtactcggggttgatcgcgctccagctgctgccgttcttctctttcagcgcggcaactgccttgatctcgttctgatatgcggacatggtcaatccttcaagaaatgtattggttgagcaccgactgacccactcaaaacctgctggtgaaggttgtcttgcgggtggctcaccgctgcatggcgagagaatgaccgtggcgaagaatgacgccgaggagggggtggagacgaacagttcgcggaccgtgcttctcgactggatcaagtgccgttcggctcgtggttgccggtgggcgactcgctgtcgagtctttcgatctggctgatacgtaaacgcttccccgtccctcaggacaacttcgttccagtcgcaatctcgtcaagccgccttgtgggcagatcaacacggtggaggccgagggcgtatcggcgcaggcaccgggagctcgtcgtttcagagcccctgattagcgggagcggggccatcatgctctggaaaaaatccgtcgtcaaacgttttgtagtgttttttcaagactactacacgaaggtctaagagtgaccggatggtcttgtctggtcgagatgtttccgtttgcatcgaaaatgcccgcaaaagcccgcgccccgcggctttgccggagcgggaggcaattcgcgctggaaagagcgccgtcggtcagtcgagggtttcgactttcaggcgcaggctggtgtcgtcgcgtccctgggtcgagtagcgacgcacgaagccgtgctggtcggcttggttctgttcgctgacgccgcccagggtgatccactcgccgagcttgccgctgacccgggtgtcggtgctctgggtatcgatgacgccgggatggctctggctgaggcggtcattgctggagctgatggtgacgtgcaccaggttgccggtcagcgtcgcggtgacgtagaagccgcggttgacgttgcggtattcggtctggctgtagatctgcccgtagggaccggtggcggtgctggtgatggggacgctctggccgacctggatcagcgccgggtagccctcggtggcctggacctgctggctgccgccggaacggctgtcggtggagcgacggatgatgcggactcgatccttgccgttgacctcgccgcggccgctctggatctcgatgttgccggcgctggccgaaccatccaccgaatagccgcggctgtcctgttgcaggttctcgctggtatccacggtgatcagcaggcgatgcgggcgcgagtcgatctgctgcaggaccgattgcaactcgcggatcttcgccggctcggcattgacgatcaactggttgccataggcggtgaccttgccttcgctgccgatgaccgactgggccaccgccatcacgtcgtcggcggtgcggtagttgagcgggatcacttcggtgcgcggggcggccgaggcaccgagaacgactgtcgccaacagcgaggagagcagggtggtgcgcaacagggtcacaggaggaagctccgcaggtccgggtcggaaagactggtgtcccaggcctgctcgaagcgggcctggagttgacgcacccgcccggcggcacggtagcaggcgtagcccgccggttgcgccggtttcgggcgcagcagcaggccctggtcgtcggccaggaggaaggcgtcgtcctctttagggtagtccgggttgaggcggcggatcaggcagttgctcgacaggcggcgcgaaaggttgatcaggcggtggccgttgcgcacggcctgggcgctgtcgccaacgaggatacgcaggcgattgcgtggattggccaggagaaaacgggtgcaggcttcctggatgctgctgtggtgatagagccagctttccaggtcgggactgtgcaggcagagcgagcggcgggcctgctgcaggagggccagggcatgggcgcgggcttcctgcggatgctcgaagcgctccagcggctcatgttcgccgaggcggaatggcgctggttcccagcgttccgcaggcagcgcggcgctggccgggttgcgtaccgcaaagcaccccggagagctgaattcgatggccggcaggtcggccggcgaggtctccggggcgtcgctcatcgggcctcagtcgctgtcgcgaaccatgtcgacatggggcaggccggcgtcgaggaactcgccgctgtcgaccttgaagcccagtcgctcgtagaagggtatggcatagacctgcgcggtcagcagttggcgcttcaggccgcgtcgctcggcttcctcgatggccgcgcgcatcagcgcgtcgcctaccttcaggccgcgccagtccttgagtaccgagaccctgccgatgtgcccgtcgcccagcaggcgcgcggtgccgatcgcgtattcgccttcataggcgagaaaatgcacggcttcgtcgtcttcggcgtcccactccagttccggcggaaccgactgttcggcaatgaagaccgcttcgcggatgcggcgcagctcggcattgtccttctgccagtcggctacgcgtacgcggatcttattcatctgcaaactccaaactgccctgtttgaccaactccgccaacagcttacgcgcatcgtcatcggccagccattggtcgaggttttccagatgcaacgcatcggccgagcagaccagcttcagcagttccttgagctgcccgggcaggagtacgctctggccgctggcgaacagcaccaggccgatgtcgatctcgctccaggccaggcgggcgctggggttgcgcaccagcagcgcgccatcctcgagggcgccgaacagctcctcctcggggatctcctcgccggcaaccagttcgggatagcgcggctcggtcatgaactggccgaaccaagtcagcagcaggcgctcgtcgctcatgtgctcctggatcaggccctgcaggcgctccagagcgtcgcgctggatctggtgcggatcgtcgcctaccggttgcaggccggcatcggtgtagcgctcctcgtcggagaggaactggccgaggaagtcggtgaaatgggtcagcacttcggcggcgctgggcgcgcggaagccgatcgagtaggtcatgcactcgtcttcggcgatgccgtagtgggcgaggcgcgggggcaggtagagcatgtcgccgggctccaggacccactcgtcgctctgttcgaagtcggcgaggatgcgcaggtcggcgtgctcgcgcagcgggctgtcgctgctgcacatctgtccgactttccagcgccggcgtccgtggccctgaagcaggaatacgtcgtagttgtcgaagtgcggaccgacgccgccgccgggagcggcgtagctgatcattacgtcgtcgatccgccagctgggcaggaagcggaattgctccagcagttgggcgacttccgggacgaactggtcgaccgcctggaccagcagggtccagtcctgttccggcaggtgctggtagtcctcctcctggaacgggccacggcgcatttcccacggggttttcccgtgttcgaggacgatgcgcgattccaccgactcctccagcgacagcccggccagctcgtcggcggacagcgggctttcgaagtccgggatcgcctggcggaccagcagcggtttgcgctgccagtagtcgcggaggaattcggcagcggtcagtccgcccagaagttgcaggggagtatcagcattcatggttaagtccttgaaacaaaaacgcccggcgcagccgggcgtgcaaaagggttgcgtgctcagatgcgcttggcctgggcggcggcattgccgacgtagccggccggggtcagcttcttcagctcgaccttggcctcggcgggaatcgccagctcttcgatgaaagtctgcaaggcttcggcgctgatgcctttgccgcgggtcagttccttcagcttctcgtaggggttttccacgccatagcgacgcatcacggtctgcaccggctcggcgaggacttcccagcaggcgtccaggtcctcggcgatgcgctgggcgttcagctccagcttgccgatgcccttcaggctggcctcgtaggcgatgacgctgtgggcgatgccgacgccgaggttgcgcagcacggtggagtcggtcaggtcgcgctgccagcgcgagatcggcagcttgctggccaggtgctggaacagcgcgttggcgatgccgaggttaccctcggagttctcgaagtcgatcgggttgaccttgtgcggcatggtcgaggagccgatctcgccggccacggtcttctgcttgaaatagccgagggagatgtagccccagacgtcgcggtcgaagtcgatgagaatggtattgaagcgggcgatcgcatcgaacagctcggcgatgtagtcgtgcggctcgatctgggtggtgtaggggttgaaggtcaggccgaggtcgccttcgatgaactggcgggcgttggcttcccagtcgacttcgggataggcggacaggtgggcgttgtagttgcccacggcgccgttgatcttgcccagcaactcgatgccggcgacctgcttgatctgccgctccaggcggtagacgacgttggccagttccttgcccagggtggtcggcgaggcgggctggccgtgggtgcgggagagcatcggcacgtcggcgaatttcaccgccagttcgcggatggcctcggcgatctggcgcatcagcggcagcagcacgctgtcgcgaccctcgcggagcatcagggcgtgggacaggttgttgatgtcctcggaggtgcaggcgaagtggatgaactcgctgaccgcggccagctccgggagcttggcggcctgttccttgagcaggtactccacggctttcacgtcgtggttggtggtgcgctcgatttccttgatgcgttcggcgtgttccagctggaagtcgctggccaggctgtcgagcagggcgttggcttcggcggagaacggcgcgacctcgggaatcccggcgtgggcggcgaggcgctgcagccagcggacttccaccatgacgcggaaacggatcaggccgtattcgctgaagatcggacgcaggctgctggttttgccggcatagcggccatcgacgggggataccgcggtgagcgaggaaagctgcatgagacgttctcgtggctggaagtcaacgaaaaaggggcgcatatcatacatgaaaggtgcgccccggtggggcattcagcggggcctttcggcggggcggttgcccagcagggggatcaggctggcggcgaagatcagggcggcgccgagcagcgacgtgtggctgggcagttcgtcccagcgcagccaggcgatcaccccggcgaaaacgatggccatgtaggcgatcggtccgatcactcccggggaggccagggcataggcctgcgacatggtcagttggccgaggctggcgaacagtccggcgccgagcagcaggagcagttcctggccgttcagcggctgccaggcccaggccagcggcacggcggagaacagggtgccgaacagggcgaagtagaacacgatgcgataggctggctcgctgtcgctcatttcgcggatcgagacgaaggcgcaggcagccatcaggctggaggcgatgccgaccagggcgatcggcgccactaccgcgccgctgggcctggccaccagcagcacgccgaggaagccgaccagggtggcgaccatcatgcggcgggtcagcggctccttgatccacaggtgtgcgatcagcggcgtgaacaccggcgcggcatagctgaacagcatggcgtcggtcagcggcaggtgggcgagggcgtagaagtagcagtacatgccgcccaggccgtaggtggtgcgcagcaggtgcgatagcgggcggcgggtgcgcagcgggccgatgccgcgagtcagcgccaggggcaggaagaacagcacgccgacgaggttgcggaagaacaccacggtttcgttgttgacggtgctggaggcctcgcggatcaggccgcccatcagggcgaagaacagcgccgaaagagccagcatggcggcgccctgggtcgggctgttgcgccgttgcggctggctcccggccatggccatggctagccgcgcagcaggggatagagttcgttgagcagccggcgccggctgaataccatctgccagcggctgccgcccagttgccgccagagccgcgccgagcggatgccggcgagcagcagggcgcggatccgcgcggcgttgctgctgacctgcaggtggcgcatgtcgccgtgtacctggatgcgctggcggaaggtgctgagggtgtcctggtagatgctggcgaacgaggcgatgacgttctcgtggaccaggccgaagtgctggacctgctgttcgacctggtcgaggcgctggccgatcaggtcgagcatatcgccgcgcttgtccagttgccgttccagggtcagcatcgccagggcgtagcgcagcggttcgcgctgcaggctgccgggcttgcgctccagggcgctggccagggctttgaagccgtcgcgcaggttgaggctgtcgccaccgtagacgtccagggtgctggccgggttgcgcgccagcaggctgccgagcatgcagcccagcggggcttcgctgatctgtccggtgcgtgccagcttgtcgaccagggctgcggattcgaagacggcgccgagggcaatcagttgctgtcgcggatcgctcacgggcgtcctccgaaatcccaggcttccgccgtttcgatcacgccgccgccgaggcagacgtcgccgtcgtagaacaccaccgattgccccggggtcactgcgcgctgcggttcgtcgaacaccgcgcggtagccttcggcggttttctccaggacgcagtcctggtcgctctggcggtagcgcaccttggcccgcaggcggcgcggccgctccagttcgaccgggttgacccagtagattcgcgaggccagcagggcgcgggagaacagcagcgggtggtcgttgccctggccgaccagcagcacgttgcgttgcaggtccttgccgagcacgtaccagggatcgtcgccggcttccttgagaccgccgatgccgaggccctggcgctggccgatggtgtggtacatcaggccgctgtggcgaccgatgaccttgccttcggtggtctcgatgtcgcccggctgggccggcaggtactgcttgaggaaatcggtgaagcgtcgctcgccaatgaagcagatgcccgtggagtccttcttcttcgccgtggcgaggccatgcttctcggcgatggcgcggacttccggcttctccagttcgccgacggggaacaggctgcgggcgatctgctcgccgcccaccgcgtgcaggaagtagctctggtccttgttcgggtccaggcccttgagcagctcggtgcgcccgtcgcggtcgcggcgccgcacatagtggccggtggcgatcaggtccgcgccgagcatcagcgcgtagtcgaggaacgccttgaacttgatttcgcggttgcagaggatgtccgggttcggcgtacggccggccttgtactcggcaaggaagtgctcgaacacgttatcccagtattccgcggcgaagttcgccgtgtgcagcttgatgccgatccggtcgcaaacggcctgggcgtcggccaggtcctcgcgggcggtacagtattcggtgccgtcgtcctcgtcccagttcttcatgaacaggccttcgacctgatagccctgctgcaacaggagcagggcggagacggacgagtcgacgccgccggacatgccgacgatcacgcgctcgcggcgtggggtgggggcggattcagacatagcgatcaggcgtcacgggcgaattcgtaaaacgcggattctatcaggcctggggtagggagggcgacacgtgggtgtcgcggatcagcgccaggggatagcggccgccggccaggtagtcgtcgatgcagcgcagcaccaggtggctgcgccagcgctgcggctgggcggccagttcgtcgcgggtcagccagcgcgggccgatgatgccgtcgtcgagggcgcgttcggggtggtggcgcacggggcgggcggcgaagcatacgcgctgataggtgacaccgttggacggcgcggtgtacaggtagatgccggtgacggcgctcagctcgacctcccagccggtttcctcgagggtttcgcgcagggcggcctcgagcaggctttcggcgggctccaggtgcccggcgggctggttcagcacctcgcggccgtcggcctgttcctcgaccagcaggaagcggccctggtcctcgacgatggtcgctacggtgacatggggatgccagctcatggatgtctcctcggtacggaaaaggcctcgataaaaagaaaccccgagcgtaggcccggggtttctgcttcgtcagcgtgacgccatcaggccaggctgtcgatcgccgcgttgaaggtggcgctggggcgcatcaccttgctggtcagctccgggttggagcgatagtagccgccgatctcggccggcttgccctggaccgcattgagttcggcgacgatggtcgcttcctgctcggtcagggccttggccagcggcgcgaagtgcgctttcagctcggcgtcttcgtcctgggcggccagggcctgggcccagtacatcgccaggtagaagtggctgccgcggttgtcgatgtcgccgaccttgcgcgacggcgacttgttgttgtccagcagcttgccggtggcttcgtccagcgccttgccgagcagcttggccttggcgttgccggtcttgatcccggtttcctccagggacacggccagggccaggaactcgcccagggagtcccagcgcaggtagttctcttccaccagttgctggacgtgcttgggtgccgagccgccggcgccggtttcgtacatgccgccgcccgccatcagcggaacgatggagagcatcttggccgaggtgcccagttccatgatcgggaacaggtcggtcaggtagtcgcgcaggacgttgccggtcaccgagatggtgtccttgccgcggatcaggcgttccatgctgacgcgaatggcctcgttgtagcccatgatgctgatgtcgagaccggtcaggtcgtggtccttgaggtacagctcgaccttcttgcgcagttcgcggtcgtgggcgcgctccgggtccagccagaagatcgccggggtatcggactggcgtgcgcgggtgacggccagcttgacccagtcgcggatcggtgcgtccttggtctggcaggcgcgccagatgtcgccggtctccacctcgtgctgcatcagcacgctgccgtcggccaggactacgcgcatggtgccgtcggcggtcatttcgaaggtcttgtcgtgggagccgtattcctcggccttctgcgccatcaggccgacgttcggcacgctgcccatggtggtcgggtcgaaggcgccgttggtcttgcagaagttgatcatctcctggtagatgcgggcgtaggtgctttccggcattaccgccttggtgtctttctgcttgccgtccttgccccacatctggccggagttgcggatcatcgccggcatcgaggcgtcgacgatgacgtcgctcggaatgtgcaggttggtgatgcctttcacggagtcgaccatcgccatttccgggcggtggctgtacacctcgtggatgtcgtggaggatctcttcctgctgggaggcgggcagcgacttgatcttgtcgtagacgctggagataccgttgttcgggttcacgccgagctcttcgaagagttggccccacttgtcgaagacgtccttgtagtagacgctcaccgcatgtccgaagacgatcgggtgggaaatcttcatcatggtcgccttgacgtgcagggaccacatgacgccggtttccttgcagtcctgcagggtcttctcgaagaagtcgcgcagcttgccgcagctcatgaacatgctgtcgagcacttcgccttcctgcaggctcagttgcttcttgacctcgaccttgccgtccttgccgacgaattcgatgcgcacgtcaccggccttggccatggtgatggactgttcgctggagaagaagtcgccgccgcgcatgtagtcggcgtgggagcgcgaggccatgctccacttgcccatggagtgcgggtgcttgcgggcgtaggccttcactgcggcaggcgcgcgacggtcggaattgccttcgcgcaggaccgggttcacggcgctgccgaggatcttcgcgtagcgtgcgcgaacctctttctcttcgtcggtctgcgggtcttccgggaagtcgggaaccttgtagcccaggccctgcagctcggcgatcgcgcctttcagctggggcaccgaggcgctgatgttgggcagcttgatgatattggcgtcgggcgaggtggccaggaccgccaggcgggcgaggtcgtcttcgatacgctggtcggcttcgaggcggtcggcgaagttggccaggatgcgtcctgcaagagagatgtcgctggtctcgacgtcgatgccggcggaagcggcaaaggccttgacgatggggaggagcgagtaggtggcgagcgcgggtgcttcgtcggtgaaggtgtaggtgatcttcgagcggatggacatctacggtaactctcttttttgctgggcgcgcacagagtctcgatacgcgttggtggacgcgatgccttcgctcaacatcgggttgaatcgaaatcgagatatgccgcgggatataggggcgccagtagagcgttgtacggcgggttcatggtggcgaacccgacgctgcgaggggagagggtctggtcccagactgctcggacctcgatgactgcgaagtcatggcgcgcagtataccaccctctcgccgggctgatgcgctcgcctgtttagactaaggaagatgtggtttccgggcggacaactgggctaccctagaaggctgcaacagggttttaaccacaacacggagttcagcatgggataccaaaagatccaggtgccggcgaccggtgacaaaatcactgtgaatgccgacatgtccttgagcgtaccgaagaacccgatcatcccgttcatcgagggtgatggcatcggcgtcgatatcagcccggtcatgatcaaggttgtcgacgctgcagtggaaaaagcatacaagggcgagcgcaagatcgcctggatggaagtctacgccggcgagaaggccacccaggtgtatgaccaggacacctggctgccccaggaaaccctggacgccgtgcgcgactacgtggtttccatcaagggcccgctgaccaccccggtcggtggcggcatccgctccctgaacgtggccctgcgccagcaactcgatctctacgtctgccagcgcccggtacgctggttcgaaggcgtgcccagcccggtgaagaagcccggcgacgtggacatggtgatcttccgcgagaactccgaggacatctatgccggcgtcgagtggaaggccggttcgccggaagcggagaaggtcatcaagttcctcaccgaggaaatgggcgtcaagaagatccgcttcaccgagaactgcggcatcggcatcaagccggtttcccaggaaggcaccaagcgcctggtgcgcaaggccctgcaatacgccgtcgacaacgaccgcagttcggtgaccctggtgcacaagggcaacatcatgaagttcaccgagggtgccttcaaggattggggctacgaagtcgcgcgcgatgaattcggcgccgagctgctggacggcggtccgtggatgcagttcaagaatccgaagaccggcaagaacgtcgtggtcaaggacgtgatcgccgacgccatgttgcagcagatcctgctgcgccccgccgagtacgacgtgatcgccaccctgaacctgaacggcgactatctctccgacgccctggcggccgaggtcggcggcatcggcatcgcgcccggcgccaacctgtccgattcggtggccatgttcgaggcgacccacggcaccgcgccgaagtacgccggccaggacaaggtcaacccgggttcgctgatcctctccgcggagatgatgctgcgccacatgggttggaccgaggcggccgacctgatcatcaagggcaccaacggggcgatcgccgccaagaccgtgacctatgacttcgaacgcctgatggacggcgcgaccctgctgtcctgctcggagttcggcgacgcgatgattgccaagatgtaggaagggctagcgcccgaacgagaaaaaggccggttcgcaccggcctttttcatttccgcatccgcgctggggtcaggcttcgatgggcgtcgcctgcggctcttcctgcggggcgggggcggagggtgcggcggttgtcgcggtggcggggctgatgttgatggcatgcagtcccttcggtccctggatgatctcgaaattgaccggctggcccgccttgagtgtcttgtaaccgtccatctgaatggccgagtaatgggcgaacaggtcctcatctcggccctcggccaggatgaacccgtagcccttggcgttgttgaaccacttgaccttaccgctgagcatgctcatatccctctgcaaaggactccaacgctggagtatcatccactacgatcccgcgtccgacctgggtcgagacgggtgcggaacccctgataccctgtaggggtattccattgtttgtaacacccttttgcagttagtcaaggcgctgaaccatacgcctgagaaacggatcaacatcatgtcggtccataactttccagaaaggcaaagctttttttcctcatgcatgcacctagccagattcgactaacattcaatcaggaccatcccgagcctcatgagcacgaggacgaaggggcggggctcgcggtacaggagtcgaagcctgtattacagccgccaccgttgtataaggtggtactgttcaacgacgattacacgccgatggactttgttgttgaagtgctggaagtgttcttcaacatggaccgggaaaaagccaccaagatcatgttgacggtacatactcagggtaaggcggtctgcggcttgtttacccgggacgtggccgaaaccaaggcgatgcaggtcaatcagtatgcacgggagagccagcatccattgctctgcgagatagagaaagacagttgatcggatgtttgggagcgaggtgaagccatgttgaatcgagagctcgaagtcaccctcaatctcgccttcaaggaggcgagggccaaacgccatgaattcatgacggttgagcacctgctgctggccttgctggacaatgaggcggcggcaacggtattgcgtgcgtgcggtgccaacctggacaagctgcggcgcgacctgcaggaattcatcgattccaccacgccgctgatcccgcagcacgacgacgagcgcgaaacccagccgacgctgggcttccagcgcgtcctgcagcgtgcggtgttccacgtgcagagttccggcaagcgcgaagtgaccggggccaatgtcctggtggcgatcttcagcgaacaggaaagccaggcggtgttcctgctcaagcagcagagcatcgcgcgtatcgatgtggtgaactacatcgcccatggtatctccaaggtgcccgggcatgccgaacatccgcaggatggggagcaggatatgcaggatgaggaaggtggcgagtcggccacgtccaaccatccgctggacgcctatgccagcaacctcaacgaactggctcgccaggggcggatcgacccgctggtggggcgtgagcatgaagtcgagcgggtggcgcagatccttgcccgccggcgcaagaacaacccgctgctggtaggcgaggcgggggtcggcaagacggccatcgccgagggcctggccaaacgcatcgtcgatggccaggtgccggacctgctggccgacagcgtggtctactccctcgacctgggtgccttgctcgcgggtaccaagtaccgcggcgacttcgagaagcgcttcaaggccttgctcaacgagttgcgcaagcgcccgcacgcggtgctgttcatcgacgagatccataccatcattggcgccggtgcggcatccggcggggtaatggacgcctccaacctgctcaagccggttctgtcctcgggcgagatccgctgcatcggctcgaccaccttccaggagttccgcggcatcttcgagaaggaccgggccttggcgcggcgcttccagaaggtcgacgtgaccgagccgtcggtggaagacacctatggcatcctcaagggcctcaaggggcgcttcgagcagcatcaccacatcgagtacagcgacgaggcgctgcgcgccgcggccgagctggcggcgcgctacatcaacgaccggcacatgccggacaaggccatcgacgtcatcgacgaggcgggcgcctaccagcgcctgcagccggaagagaagcgcgtgaagcgcatcgaggtggcgcaggtcgaggatatcgtggcgaagatcgcgcggatcccgccgaaacacgtcaccacctccgacaaggagttgctgcgcaacctcgaacgcgacctcaagctgaccgtgttcggccaggacgacgccatcgagtcgctgtccacggcgatcaagctgtcccgggccgggctcaaggcgccggacaagccggtcggctcgttcctcttcgccggtcccaccggcgtgggcaagaccgaggtggcgcggcagttggcgaaggccttgggcgtggagctggtgcgcttcgacatgtccgagtacatggagcggcataccgtgtcgcggctgatcggtgcgcctccgggctacgtcggcttcgaccagggcggcctgctcaccgaggcgatcaccaagaccccgcactgcgtgttgctgctcgacgagatcgagaaggctcacccggaggtcttcaacctgctgctgcaggtgatggaccacggcaccctgaccgacaacaacgggcgcaaggcggacttccgcaacatcatcctgatcatgaccaccaacgccggcgcggaagtggcggcgcgcgcgtcgatcggcttcaaccagcaggatcacaccaccgatgcgatggaagtgatcaagaagagcttcaccccggagttccgcaaccgcctggataccatcatccagttcggccgcctgagcaccgagacgatcaagagcgtggtcgacaagttcctcaccgagctgcaggcgcagctggaggacaagcgcgtccagctcgaggtcagcgatgcggcgcgcggctggctggcggagaagggctacgacgtgcagatgggtgcgcgaccgatggcgcggcttatccaggacaagatcaagcggccgttggccgaggagatcctgttcggcgagctggccgagcatggcggcctggtgcatgtcgacctgaagggcgacgagctggccttcgagttcgagatcacggcggcggagcccgcctgatccgagcgcggcaacgaaaacgcccggcagatgccgggcgttttcttttgcaatcggcgagccgcagcggctcgtgtcgactcagcgggcgcggtaggtgatgcggcccttgctcaggtcgtagggcgtcagttccacgcggaccttgtcgccggtgaggatgcggatgtagttcttgcgcattttgccggagatgtgcgcggtgacgacgtgcccattttccaactccacacggaacatggtgttgggcagggtgtcgacgacagtaccttccatttcgaagctgtcttctttcgacatgcagtagagccctcggtatctatgggtggccctttcaatgagaggtgggccgtgaaaagcggcgtgcattgtgccagaaaatcgacaatagcgccacacggctatcaggtgagggcgacccagcgctggttgacgaacagttcgatgggccggtactgggtcttgtagttcatcttgcggcaattcttgatccagtagcccaggtagacggcctgcaggcccaggcgttcggtctcggcgatctgccagaggatcgcgtagcgtcccaggctgcgctgctcttcgtcgggatcgtagaaggtatagacggccgagagtccgttcggcagcacgtccgtcacggctatggccagcaggcggccatgcaggcggaactcgaagaagcagcagaagggcaggtcgcggaccaggaaggtggcgaactggtcgcggctgggcggatacatgtcgccgtcggcgtggcgttgctcgatgtagcgccgatagaggtcgtagtactcctcgttgaagctcggtcgcttgcggatcacctgcagttccgcattgcgcttgaggatgcgccgctgctggcggttcgggctgaagtcggcgaccggtatgcgcgcggcgatgcaggcggtgcaatgctggcagtgcggacgatagagatggtcgccgctgcggcggaagccgacctccgacagcgaggcgtacagctgcgtgtccatgggctggctgggatcgaggaacagggtggttgcctgctcctcgggcaggtagctgcacgggtgcggttgcgtcgcgtagaacttcagtcgggcgagttcggtcatggtgaactccagcagggacccataagcaagtttatgccaggcacggaaactcgcctaaaaatccaggtcgccggtaggaggctggtcgcgatagcgttgcaggtagtcggcgaattccccccggctgatggcgcgggcgcccaggctgtgcaggtggcgggtcggcatctggcagtcgatgaggacgaagccggcgtcgcgcagatggcggaccagcgtgacgaagccgaccttggaagcgttgtcggcgcggctgaacatcgattcgccgaagaacagcctgcccatggccaggccgtagaggccgccgaccagttgtcgctcctgccagacttccacggagtgggcgatgccgcgcaggtgcagctcctggtaggccagttgcatcggcgtggtgatccaggtgccgtcggcgtagttacgcggcgcggcacaagcctggatcaccgcccggaagtcacggttgaaagtgacttcgaagcgttgctggcgcaggcacttggccaggctgcgggaaacgtgcagttcgtcggggaacaggacggtgcgcgggtcgggcgaccaccagaggatcggctggccatcctggtaccaggggaagcagccgtggcgataggctgcgaccaggcgttgcggattgaggtcgccgccggccgcgagcagcccgttgggctcctgcagggccttgtcgaggggcggaaagtcgaagtcggtgcgggaaagccaggtcagcatggcggggtaggggagggcgggcctcccccgggtccgatcaatggtcgtcgaggtatttttcggcatccagcgcggccatgcagccggcgccggcggaagtgatggcctggcggtagacgtggtcggccacgtcgccggcggcgaacacgccttcgatgctggtctgggtggcattgccttcgctgccgccgtggatccgcaggtagccgtcgcgcatttccagttggccctggaacaggtcggtgttcggcttgtggccgatggcgatgaacacgccggccagcgatagctcgctggtgctgccgtcgatggtgctcttcaggcgtacgccggtgacgccgctggcgtcgcccagcacctcgtccagggtggtgttccagtgcaggcgcacgttgccgttctcggccttgtcgaacagcttgtcctggaggatcttctccgagcgcagcttgtcgcgacggtggatcaggtggacttccttggcgatgttggccaggtacagcgcttcctcgacggcggtattgccgccgccgaccacgcagaccacctggttgcggtagaagaagccgtcgcaggtggcgcaggcggaaacgcccttgcccatgaaggcttcttccgacgacatgcccaggtattgcgcggaggcaccggtggcaatgatcaatgcatcgcaggtataagtgccactatcgcccttcagtgtgaaggggcgctgttgcaactcggcggtgtggatgtggtcgtagacgatctcggtgtcgaaacgctcggcgtgctgctgcatgcgggtcatcagcgccgggccggtaaggccttcgacgtcgcccggccagttgtcgacttcggtggtggtggtcagctggccgcctggctggatgccggtgatcaccactggcttgagattggcgcgtgcggcgtacacggcggcggtatagccggccggaccggagcccaggatgatgaggcgcgaatgcttgacttcactcataaaaagactccataagcctttgtcacataagaaaatgcgtgctccaatggagccgcctgaagagttctgccggctatgctacacctatccgcaaaaggccggcaaaaccccggggccgggatcagccacgcacggattgccgctgatttcgggtgtgatttttcagagtttccctaaagccgtacaataggcgcgttttgaccaagacagcttctaaagcaccagccgtgcgcaggaaaaatagcgatttgaaggattcgaccaccgcgagccatgccgccgcatggcgtcagcaactgcattcccgcctgaaggaaggggtcctgatcgcgctgggcgcgctctgcctctacttgtggatggctctgctcacctatgacccggccgatccgagctggagtcactcgagccaggttgaccaggtgcagaatgccgccggtcggctcggtgcggtatccgccgatatcctgttcatgacgctcggctacttcgcctacctctttccgctgttgctgggcatcaagacctggcaggtattccgccgccgcaacctgccgtgggaatggaacacctggctgttttcctggcgcctggtcgggctgatcttcctgatcctggccggctcggcactggcctacatccatttccacgccagcggccacatgccggccagcgcctcggccggcggcgccatcggccagagcctgggccgcgtcgcggtggatgcgctgaacgtgcagggcagcacgctggtgttcttcgccctgttcctcttcggcctgacggtgttcgccgacctctcctggttcaaggtgatggatgtcaccggcaagatcaccctggacttcttcgaactgatccagaacgccttcaatcgctggatgggcgcgcgcgccgagcgcaagcaactggttgcgcaactgcgcgaggtcgacgagcgcgtcgccgaggtggtggcgccgagcgtgccggaccgccgcgaacagtccaaggccaaggagcgcctgctggaacgcgaagaggccctggccaagcacatgagcgagcgggagaagcgcccgccgccgaagatcgatccgccaccgccgccgaaggccccggagccgagcaagcgcgtgctgaaagagaagcaggcgccgctgttcgtcgatacggcggtggagggcaccctgccgccgctgtcgctgctcgatccggcggaagtgaagcagaagagctactcgcccgagtcgctggaggcgatgtcgcgcctgctggagatcaagctgaaggagttcggcgtcgaggtcagcgtggattcggtgcatccgggccccgtgatcacccgtttcgagatccagcccgcggcgggggtcaaggtcagccgcatttccaacctggccaaggacctggcgcgctcgctggcggtgatcagcgtgcgggtggtggaagtgattcccggcaagaccaccgtcggcatcgagattcccaacgaagaccggcagatggtgcgcttctccgaagtgctgtcgtcgccggagtacgacgagcacaagtccaccgtgccgctggccctgggccacgacatcggcggtcggccgatcatcaccgacctggcgaagatgccgcacctgctggtggccggtaccaccggctccggtaagtcggtgggggtcaacgccatgctcctgtcgatcctgttcaagtccacgccgagcgaggcgcgactgatcatgatcgacccgaagatgctcgaactgtcgatctacgaagggatcccgcacctgctctgcccggtggtcaccgacatgaaggaagccgccaacgccctgcgctggagcgtggcggagatggagcggcgctaccgcctgatggcggccatgggcgtgcgcaacctggctggcttcaaccgcaaggtgaaggacgccgaggaggccggcacgccgctgaccgacccgctgttccgtcgcgaaagcccggacgacgagccgccgcaactgagcaccctgccgaccatcgtggtggtggtcgacgaattcgccgacatgatgatgatcgtcggcaagaaggtcgaggagcttatcgcccgtatcgcgcagaaggcgcgggcggccggtatccacctgatcctggcgacccagcggccgtcggtggacgtgatcaccggcctgatcaaggccaacatcccgacccggatcgccttccaggtctccagcaagatcgactcgcgcaccatcctcgaccagggtggcgccgaacaacttctcggccacggcgacatgctctacctgccgccgggcacaggcctgccgattcgcgtgcacggcgccttcgtttccgacgacgaggtgcaccgggtggtcgaggcctggaagctgcgcggcgcgcccgactacatcgaggacatcctcgctggcgtcgacgaaggcggcagcggtggcggttccttcgatggcggcgacggctccggcgaaggcagcgaggacgacccgctctacgacgaggcggtacgtttcgtcaccgagagtcgccgggcatcgatctccgccgtgcaacgcaagctgaagatcggctacaaccgcgccgcgcggatgatcgaggcgatggagatggccggcgtggtcaccccgatgaataccaacggctcccgcgaagtcatcgcgccggcgccggttcgtgattgaacccgacaggttttagaggattccgatgcgactgatccgcacgttgttcgttgccgccctggccatgggcgcttcgctggcccatgccgacgacagcgccgctgtccagcgcctgaccggcctgctgaacaaggcccagaccctgaccgcgcgtttttcccaactgaccctggacggtagcggcacgcgcctgcaggaaaccgccggccaactgagcctgaagcggccgggactgttccgctggcataccgatgcgccgaacgagcaattgctcatttccaacggcgagaaggtctggctgtacgacccggacctggagcaggtgaccatccagaagctcgatcagcgcctgacccagacgccggcgctgctgctctccggcgacatctcgaagatcagcgaaagcttcgccatcacctacaaggaaggcggcaacgtagtcgatttcgtgctcaagccgaagaccaaggacaccctcttcgacaccttgcgcctgtcgttccgcagcggcaaggtgaacgacatgcagatgatcgatggcgtcggccagcgcaccaacatcctgttcttcgacgtgaagatgaacgaggcgctggatgccaagcaattcaccttcgacgttccgccgggcgtcgacgtgatccaggagtaagcgcaagccgtggatctgttccgcagcgagcccgtcgcgcagcccctggcggcacggctgaggcccgcaaacctggacgagtacgtggggcaggaacacctgctggcccgcggcaagcccttgcgcgaggcgctggagcagggcgcgctgcactcgatgatcttctggggcccgccgggagtcggcaagactaccctggcgcggctgctggcgcaggtgtcggacgcccatttcgagaccatttccgcggtgctgtccggggtcaaggagatccgccaggcggtcgaggtggccaagcagcacgcggcgcaatacgggcgccggaccatcctgttcgtcgatgaggtgcaccgcttcaacaagagccagcaggatgccttcctgccctatgtggaagacggcacgctgatcttcattggcgcgaccaccgagaacccgtccttcgagttgaacaatgcgctgctctcgcgggctcgcgtgtatgtcctcaagagcctcgacgaagccgccctgcgcaagctggtgggccgcgcgctgaacgaggacaagggcctcggcaagcgcaagctgaggctgccggaggagagcttccaggttctcctggccgccgccgacggcgatgggcggcgcctgctgaacctgctggagaacgctgccgacctcgccgaggacggcagcgagatcagccccgagctgctgcagaatctgctcggcgatacccgccgacgtttcgacaagggcggcgaggcgttctacgaccagatcagcgcgctgcacaagtcggtgcgcggctccaatcccgacgcggcactctattggttcgcgcgtatgctcgacggcggctgcgatcccctgtacatcgcccggcgggtggtgcgcatggccagcgaggaggttggcaacgccgatcctcgcgccctcggcctatgcctgtcggcctgggacgtgcaggagcgcctgggcagccccgaaggcgagctggcggtggcccaggccatcgtctacctggcctgtgcgccgaagagcaatgcggtgtacagcgcgttcaacgcggcgatgcgcgacgtcgccgaaagcggctcgcgggaagtgccattgcacttgcgcaacgcgccgaccaaattgatgaagagccttggctatggcgaggaataccgctacgcccacgacgagccggatgcctatgccgccggagaggattatttccccgaggatctggagccgcggcgttactatcaaccggtgccgaggggcctggaactgaagatccgcgacaagctggaacacctggccgagctggatcgcaccagtccccgccaacgcagaaaatcctgagcggtatgggctcggcggagctagccaggcttccgcgacggcgtcgatgacgtcgccggggccggcgaagcgccaaccgggccacgaaccgccgataaccgacacgagacgagaaaagagcatgctcgatcccaaactggtacgcacccagccgcaagaagtggctgcccgcctggccacccgtggcttccaactggatgtcgcacgcatcgaagcgctggaagagcagcgcaagtcggtacagacccgtaccgagcagctgcaagccgagcgcaacgcgcgttccaaggcgatcggccaggccaagcagcgtggcgaggacatcgcgccgctgctggccgatgtcgatcgcatgggctccgagctggaggaaggcaagcgccagttggacgccatccagggcgaactggatgccatgctgctgggcattcccaacctgccgcacgagtcggtgccggtcggtgccgacgaggacgccaacgtcgaagtgcgtcgctggggcacgccgaagaccttcgatttcgaggtcaaggaccatgtcgccctcggtgaacggcacggctggctggatttcgagaccgctgccaagctttccggcgcgcgcttcgccctcatgcgcggcccgatcgcccgcctgcatcgcgccctggcgcagttcatgatcaacctgcataccgccgagcatggctacgaggaggcctacaccccctatctcgtccaggctccggcgctgcaaggcaccggccagttgccgaagttcgaggaggacctgttcaagatcggccgcgacggcgaagctgacctctacctgatcccgaccgccgaggtttcgctgaccaacatcgtctccgggcagatcctcgacgccaagcaattgccgctgaagttcgtcgcccataccccgtgcttccgcagcgaggccggtgcctccgggcgcgatacccgcggcatgatccgtcagcatcagttcgacaaggtggagatggtgcagatcgtcgatccggccacttcctacgaggcgctggaaggcctgaccgccaacgccgagcgcgtcctgcaactgctcgagttgccgtatcgggtgctggcgctgtgcaccggcgacatgggcttcggtgcgaccaagacctacgacctggaagtctgggttcccagccaggacaagtaccgcgagatttcctcctgctccaactgcggcgacttccaggcccggcgcatgcaggcccgctaccgcaatccggaaaccggcaagcccgagctggtgcacaccctcaacggctccggcctggccgtcggccgcaccttggtggcggtactggagaactaccagcaggcggacggctcgatccgtgtgccggaagtcctcaagccctacatggctggcatcgaggtgatcggctgacatggatttcctgccgctgttccactccttgcaagggcgcctcgcgctggtggtcggtggcggcgaagtcgccctgcgcaaggcgcgcctgctggccgacgccggcgcgcgcctgcgcgtggtcgcgccgcagatccacatcgaactgcggcatctggtggagcagggcggcggcgagctgctcgaacgcgactaccaggacggcgaccagcccggctgcgccctgatcatcgccgccaccgacgacgaaccgctgaacgccgaggtgtcgcgagcggccaatgcgcgcgggataccggtcaacgtggtggacgcgccggccctgtgcagcgtgatcttcccggccatcgtcgaccgttcgccgctggtggtggcggtctccagcggcggcgatgcgcccgtgctggcgcggctgatccgggccaagctggaaacctggattccctcgacctacgggcaactggccggactcgccagccgcttccgccaccgggtcaaggaattgctacccgacctgcagcagcgccgggtgttctgggaaaacctgttccagggcgagatcgccgagcgtgtcctggccggccgtccggcggaagccgagcgtctcctggaggagcacctggccggcggcctcgcgcacatagccacgggcgaggtatatctggtcggggctgggccgggggatccggacctgctgacgttccgtgccctgcgcctgatgcagcaggccgacgtggtgctctacgatcgcctggtggcgccgtcgatcctcgaattatgccgccgcgatgccgaacgcctgtacgtcggcaagcgccgcgccgaacatgcggtgccgcaggatcggatcaaccgcctgctggtggagctggccagccagggcaagcgcgtgctgcgcctgaagggtggcgacccgttcatcttcggccgcggcggtgaggaaatcgacgaactggctgcccacggcatacctttccaggtcgtgccgggaatcaccgcggccagcggctgcgcggcctacgccgggattccactgactcatcgcgatcatgcgcaatcggttcgtttcgtcaccggtcatctgaaggacggcaccaccgacctgccgtggcaggacctggtagcgcctggccagaccctggtgttctacatgggcctggtgggattgccggtgatctgcgagcaactggtcgcccacggtcgctccgcacagaccccggcggcgctgatccagcaggggaccaccgcccagcagcgggtattcaccggaaccctggaaaacctgccgcaactggtggctgagcacgaagtgcatgcgccgaccctggtgatcgtcggcgaggtcgtgcaactgcgcgacaagctggcctggttcgaaggcgcccgcgaggacgcctgagccttcagccttctccccagatgcccttgccgggaagtcgttcccggcctggcgcgcgcgccaggtcgagacgcgggcccagcggtactatcccggtcgggttgatggtgcggtggctggcgtagtagtgccccttgatatgttcgaagtccactgtctcgccgatgcctgggcgttggtacagctcgcgcaaccagccggagagattcgggtagtcttcgatgcgccgcaggttgcacttgaagtgtccgtggtacaccgcatcgaagcgcaccagggtggtgaacaggcggatatcggcctcggtcaggtattcgccggccaggtagcggcgttcgccgagcaagccttccaggtagtccagctcctcgaacaactggacgaaggcctcctcgtaggcgtcctggcgagtggcgaagccagcacggtacacgccgttgttgaccgccggatagatgcgtccgttgaggcgttcgatctcctcgcgcagcggctccgggtagaagtccagcgcgttggcgccgatggcgtcgaaggcgctgttgaagatgcggacgatatcggctgattcgttgttgacgatcttctgcgcctgcttgtcccacagcagcggcaccgtgacccggccgctgtagtgcgggtcgtcgcgggtgtagcgctggtgcagaaaggccaggccgtcgaggcgatcgccggtggagccgtgggcggggtcgaaggtccagccgttctcgcgcatcagccaactgaccaccgaaacatcgaccagcgactccagccccttcagcttgcgcacgatcagggtccgatgggcccaggggcaggccagcgagacatagagatggtagcgcccgccctcggcggggaacgccggctcgcccagccaatggcggcgctgggcgttttcgcgctggaagcggccgtctttctgtgtgtcataccactggtcgtgccaacggccatcgatcaactgtcccatgagcgggttcctccatacgtcgttggaggaacagtctagtgtcgggcgatcgataaatttatataaataaagggctattcgtatcgatcagatcgattcgtttcgggtcgcccagtagtgcgcggcttccttgaaggcttcttcgcgattcttgccaagggcccgtagcgccagggccatgctggagagcaccgccaggtggccataggcgtcgccttcgcggccgtcccagacggcccgaaggaaacccgggtcgagctgttccggcttcatgtgccggtgcgtcgacaatgccggccattcctcgtcccaggcttcgccctggtcgcaaccatacaggtgggcgacgacgtccgggttgacttcgatctcgccgccttcgcccttgatgacgatggcccggtcgccgagcaggcggctggcctcgcggtgggtttcctggtaaccggggtggaagatgctctgcaggatgcaatccgcattcagggggttgagcaggcgaaccagcgaatggatcggcgagcgcaggccgagggtattgcgcagatcgatcatgcgttgcagcaccggcatccaggcgccgagcggaatgaacgccaggtggccgcgctccagggcctgttctacctgcagccagtcgtggcagagcgggatctccagcgccgccagcaactgttcgctgtacaggcgtccggcggtatgcgcgccgccgccgtgcatgaggatccgcacgccatggccggccaggcatttggcggccagcaggtaccagggcaggtggcgcttcttgccggcgtaactgggccagtcgaggtcgacgcgcaaggacgggacttgcaggcgctcgcgcaccgcctcggtgaaaccggccagttcctcgctgctttcctccttgtgccgcaggagcatgaggaaggcgcccaactgggcgtcctcgaccctgccgtcgaggatcatgccgagggcctcgcgggcttcctcccgggtcaggctgcgcgctccgcgcttgcctttgccgaggatgcggacgaactgggcgaacggatgttcggcgggagtcgagagagtcatagacagttgctcggtttcggcaggccggccagcttcgcgccaagcttggccggggcgcccttgaacaggtggttgaggtgcaggctgttgcccttgtccggacccagtcgctgggcgacgtacttgatcagcgggcggttggccggagacagctggaactccgcatagaactcgcggagcagttggagaatctcccagtgctcggcggtcagggccagctcctcgcgggcggccagggcttccgccaccggctccgaccaatcgtcgagggcggcgaggtagccgtccttgtccagccggatttcccggccttccagcgtaaggagcgtcatagccaactgttgaccttgtcgaagcgggtggcgagttcgacgaagccggggtagtccaccgccaccaggcgagcggggacgtcctcgataccgcgcgcctggaggtcttccagcagggcgaacagttcgatttccgccggcatcagttccagagcctggcaggcgtggctgccggccagcagggcgtgcacggcgtcgccgcagagcagcaggccgtcgccggggttgagcaggtacaggcaactgcccaggcggccgtcattgaacggcgagcgggacagtacgtggagggtcgtggccatcagagggtaatcacctggtcgtagcgttgcagcaggtcgcgcagggcctggtcgtcgagcacctcgaccgcgagggccaggcgctcttcagccaggccacgctcgcgcaggctgcgggccgagacgtagaggtcctccacgccgaacatcggcagggcctgcaggttggcctgcaggtccttctgctgcaggtgcgcaggatgctggccgggagccagctggaacgcgccgtcgtcgaggaacagcatgccgaccggtagatcgaaggcgccgccggccagggctatgtccagcgcctcgcgggcgctcgggccggaccagggcgactggcggctgatgatcagcagcgactggctcatcggtcgcctccgaagcagaccaggcggtccgcgctttgcgccgcctcgtgcaactggccgagtccggacagttcccatggtgcgccaaggttggcgccgggacggccgtagcgttcggcttcctcggcgttcagcacgccgcggcgcagggcggcggcgatgcagaccacggcgtccaggccgttgcgctcgaccaactcgcgccaggcggcgggcaggtcgaactcgtcctggccgctcacgacgttggccgaggcgctgtgcacgccgtcctggtagaagaacaggcggacgatttcgtgcccgccggccagcgcggcttcgctgaagcgcagcgcgcggcgggcggcgggggagtggggagggtcgaatagggcgatggcgaatttcatgctgcgatacgcgaaggatttcttcgaatgataaaccaatgcctgtgttttgccggtccgcaaatgaaaaagcccgtcgcggggacgggcttttccggaggcgttttctatcagtcgtcgccgccggcgatgccgaagatctgcaacaggctgatgaacaggttgtagatcgacacgtacaggctgatggtggccatgatgtagttgcgttcgccgccgtggatgatcgcgctggtctggtagaggatcatcgccgaggagaacaggacgaagccggcgctgatcgccagttgcaggccactgatctggaagaacagcgataccagcacggcgcccagcaggacgaagaagccggcggtgatgaagccggacaggaagctcatgtccttgcgggtggtcagcacataggcggacaggccgaagaacaccagggcggtcatggcgaacgccgaagtgatgacgctgccgccgttgggcaggccgaggtacatgttgaggatcgggccgagcgtgtagcccatgaagccggtcagggcgaaagtgctgaccagaccccaggcgctgttgcgcagcttcacggtgaggaagaacaggccgtagaagccgatcagcaccacgaacacgttcggatagggcaggcgcatctgctgcgaaacgtaggccaccaggccgctgaaggccagggtgagtgccagcaggccgtaggtattgcgcagaacgccgctgacttcacgctgttccgcgacggcggagttcagctgatattgctgttcttgcatggtgtgggtactccttaacgggaacgggtccatgacgtactgatgggcatgatagcaaagcctctgccagggccaatcgatagagtttgacagtgtgttgctatccggtactatggcgccccgcgatgcggaggtgtggccgagtggtttaaggcaacggtcttgaaaaccgtcgaaggggagactcttccgtgagttcgaatctcaccgcctccgccatatccgcgtactgaaaagccccgctgagcggggcttttgcattttcggggcgccgctcttccgcacttccggatcgtttccgcagcctgcccggcgtcgattcgatgactctccgatttcgtcgggtaatggcttcagatcacgaagaagccgtgagttccgtcgcgaccgagttgctccaccaggccgaactcccagtccaggtagccctgcatcgcttcgcgcggattgtcggtaccttcgtaggggcggcggtagcggtcgatgcgcggcgacgccaacaggctttcgccgtcttccgtcggcaggcccgcggcgacccaggcgctggtgccgccgtcgagaaggaacaccggcttgccgctgagtgcctggacttccgccacggcgaagcgtgccagcaggctgctgccgcaggtgagtacgtagcgctcggccgtgcccagccgttccagtgcctgcttcaactggctgcgcaatacccaggcggcgccggggatgtggcgtttcgcatagttggcgctggcggtgaagtcgagcacccgggtgcccggttcgcccagccagtcggcgagggtggtcgggtcgatggtgtcggcccggggttgcctcggcagcggcgcgctccaggcgcccctctcgctgaagtcggcgtcggagagtccgtccagtaccgcgacctgccagcccatctgggccagccaggaggcgctcatgttggcgcgtacgccatcgtcgtccaccagtaccaggcgcgcgccgcgcacgctggcgacatggtcggtttcctgaaccagctggccaccgggcgtggagcgggagccaggcaggtgaccggcttcgtattcctcgggcgtgcgtacgtcgagcaggtaggtggtgcggtcgtgctcgtcctgccattgggccagaccggccaggtcgaggcgttcgacgccggcgcggtcggcgacggcacgggcgcgctgggcggcggccttgcgggtgtcctgggagatcgcaccgaagcgtcgcgtctggccgtgttccagttgctgaccggccagcgtccagccgatggtgccgttgcgtaatgccgccaccgggttggggatgccggcgttgagcagcgactgggtaccgatgatgctacgagtgcgcccggcacagttgactatcacccgggtgcgcgggtccggcgccagttcggcgacgcgcagcaccagttcggcgccgggcacgctgatgccgccggggatactcatggtctggtattcgtcgaaacgacgggcatccaggatcaccgcgtcggccctggcatcgagcaaagcctgtacttcctccgcggccagcgatggcgtgtggcgctcggcctccaccagttcgccgaaggccttgcttggcacgttcacatccctgaacagctcgccgccggcgttgcgccaaccggacaggccgccatcgagcaaggccacgtcgctgtagccgaggtcgaggaggcgttgcgcggcgaccggcgccaggccttcgccgtcgtcgtagacggtaatcggcgtgtcgcggcgcggcacccgggcatggatctccagttccagcctggacagcggcaggttggcggcgaacaggggatgggcctgggcgaacgggtcctcctcgcgcacgtcgagcagcgccagctcccggcgggcgaggagagcggcgcggatatcgtggaaggtgcgtacggcgatctggctcatgcggggttctctttcgacaggtcccagatattgggcaagcggctgttggaatagccggaaatgaagggtttttcctcaccttcggcgctgaacacggcacgccgtaccgcaccgatattggcgccgtagacgtggatactgatggatgtgcggtcgctgaaggcgttgctcacctggtgcacgtcgccaatgcgtggcgacagcgcttcgacctcgccgggctccaggcgtcgacgggctccgctgggatgcggacgcccccccgcatcgaaggcgtacggctgcgagtattcggccccgcggagcatgccgatcaggccccagacccgatgatcgtgtaccggtgtgatctggcccggcccccagacgaagctgaccaccgagaagcgctgccgtgagtcgacatgcagcaggtactgttggtagcgctgtggatcggggcgggcgcagtcttccggcagccagtcgtcctggcgcaccagctcggccagcagggggtgggcttgggcgagcagggtggattcgtcgggacggctgtcgagcagtgtcgccagctcgccgatgaactggcgcaggcggtcgaggcgcaggatggatgacatgcggggattcactccgggaagttctggcggtacggtagcaaacgcttttttattcctgaaatgcattttgaatctaagctaatatgcgagaaatgcaattggtgccggccccatgaaaatcgatgacatcgacgccttcgtcgcggtgatccgcaacgcttccctgagccaggccgccgagagcctgggcctgacccagtctgcgatcacccggcgggtacagagcctggaggagtccctcggagtggcattgctggaccgcaataccaagccgctcaaacccaccgccagcggactgcgggtctacgaacagtgccggcgggtgctgcgcgaggtggatggcctgcgtgaactggtggccggtgacgccacaccaagtggcgtgctgcgcctgggcgtgccgcagagtatcggcgaggtggtgttgctggatgcccttcggcggctggccgacgagtacccggagctgcgcgcgcaggtcggcactggctggggcagccatttgctggcgcgcctggagaatgccgaactggacgcggcagtggtgttgtttccgccaagcaaggtgttccccgaagaactcggcgccacgcccctagggcgcatggaactctgcgtggtggtcgcccgcgacagtgccatccaggcgcgacgcctgctcgattgctaccaccatggctgggtgctcaaccccgatggctgcggcttccgtgccggcctgcaacgggccctggccgatcagggcctgggcctgcaactgaacctcgagactttcggcagcgagctgcaactgggcctggtcgccgcgggccggggtctcggcctggtgccggcgccggccctggcgcgtagccgctaccgcgatcagttgcaggtgctgcaactggaggatttccagccgctgatccagctctggctggtgcgtccgcgcctgctgggcaatctggagacgccggcacggctgttcggcagggcggtggccgaggggttggatatgcaagccggttgagtagcggcgccgggagatccccgggagacgggagcgtgaatgagaaggggctgcagtcgggatcaacattcccctgcgagccccttttcgcttcagagggaagagggagcgagggcggctacgcatagtgtccgccttgggaaacgcaaagacggaaaagctaaatatgcgcgtttagcatattaagatatgaaaaaaatgaatttccatcatgtagtttcagcctgtagcttctaagaaaagcacccatgcagatgtttttcttataacgacagccgccaaccttatcagtcgagcggcccaggcgagggcaacagcgtgagcgtggaaattctcggcatgatcaccgccacaccgagttccgaggtggaccagccgttgggggaggctgtggacgccggtttcgtccggcgtttcgcccaggcccatgaggacgccggcttcgaccgggtgctggtggggtatttcagcaatgccgccgagggcgcggtggtcagttccttcgtcgccgctgccacccggcgccttggcgttctcctggcctatcgcccgggggtgattgcagcgccgctggcggcacgccaactggctaccctggatcagttcagcgagggccgcctggccctgaacgtagtcagtggtggtaacgacgaggacctcgcgcgcgatggcgactacctcgaccatgaccgccgctacgcccgtaccgacgaatacctgcaagccctgcgtgctatctggaccgccacgggaccggtggatttcgacggcgagttctaccgcttccagggcgcctcgccagcggtgcgcccgcgccagtcgccgcacataccgatctatttcagtggctcctccgacgcagccatcgaggtcgccgccaggcacgccgacacctacatgctctggggcgagccgctggccgcggtcgacgggcatatccgccgagtgcgcgccgccgccaaggcccagggacgcgatccgcgcttctcggtgtcattccggccgatcgtcgcggataccgaggaggccgcctggaagcgtgccgccgaggtgctcgaacaggtccgcgagaaccgtgcgcgcctcggtctgccgctgcgcgaccaccagccgcagaacgtcggttcgcagcgcctgctggccgccgccgagcagggcgaggtgctcgacagccgtttgtggaccggcgtggcccggctgaccggggcgcgctggaactccaccgccctggtaggcacccccgagcaggttgccgctgcgcttggcgagtactaccggctgggcgtctcgaccttcctgattcgaggcttcgagccgctcggcgacgccgtgcgctacggccagggcctgattcccgccatacatgaccatatcgcccgcctgccgctgttgcggcacgccggttgaggagctccgatgaaactcaagcaatacctgctaaccagcttcgccacgcttctgctcggtgcctccctggcccaggccgcagagctgccgacgttgcgtgtgggcgaccagaactactacaacgtgcgggcttccatggaggcctcgggagttctcgaaggcgcgccttaccaggtcgaatggaagcatttccagtccgccgcgccggtggccgaagggttgcaggccggagcgctggacctgggtttcctcggcgactcgggcttcatcttcctcgccgccaagggcgcgccggtgaagctggtcggcgtctcgcggcagaaccccgataccatagccctgctggtgccgaaggattctccggtgcgcagcattgccgatctcaagggcaggaaagtcgcctactggcccggtgcctggagccagcaactgaccttgcgcgcgctggagaaagccggcctgccgaaggactacgtggagttcgtcaagctgatgccgatcgacgccgccgccgccttgccgcgcggcagcatcgatgcctttccggtgtgggagccgtatatctcgcagcagatcgtggtttccggcgcacggccgattctcaccgcccgcgacctgatgccggggctgtccagcatcgccgccaacgctgcttccatcgagcccaggcgcgcgcagatcgccgacttcctcggccgcctgcgcaaggcacgggcctgggtcgaggcacacaaggagcagtacgccgacctctgggcgcagaaggccaatctcgaccgggcagtctcccgccattggatcggccaggccggcatgagcgtcggcccggtagacgcccaggccgccaccgactaccaggagaccgcggatttcctgctgcagaccggtgccttgcccaagccgttcgacacttccacggtgatcgacacgtccttcaacgaagccttccactgagtacggaccatgagcatccagtttctcggcatgatcggccatcgcctggcctcggagaccctcgcgccggtcggacctatcctcgacaagccttacatcgccgctttcgcacgcgcccacgaagaggccggcttcgatcgaatcctggtcggctactggtcggaccagccggatggattcctggtggccgccgccgctggcctggccacttcccggatcggtctgctgctggcgcaccgccccggtttcgtcgccccgaccctggccgcgcgcaagctggcgaccctcgaacacctcctcgacgggcgcctggcggtgcatatcatcagcggcggcagcgacgccgaccagcgcaaggacggcgattatctcgaccacgaccagcgctatgcccgcagcgacgaattcatcgaactgctcaagcgcacctggaccagcaccgaacccttcgattttcacggcgcgcactaccgcgtggagcacgccttctcggccatccgtccgcagcagaaaccgcacattccggtgtatttcggcggctcctcggaagccgcgctgaaggtcgccggcaagcaggccgatgtgttcatgctctggggcgaacccctggcacaggccgccgaaaccatctccgctgtgcgcgaacaggcgcgctcgaatggtcgcgaagtggagttcagcctgtcgttccggcccatcctcgggcgcacggaggacgaggcctgggccaaggccgaggcgatacgcgcaagcgccggcgcgcgcctgggcgaggccggcttccccaagggcaagccgcagagcgtcggcgcccagcgtctgctcaaggcggtggagcagggcgagcgcctcgacgagcgcctttggaccggaatcgccaggctggtcggtggcgggcacaactccaccgccctggttggtaccgcggaacaggtggccgacgccctgctcgcctactacgacctgggcgtgcgcaatatcctcattcgcggtttcgatcccctcgccgatgccgtggaatatggccgcgagctgatcccgctgacccgcgccaaagtcgccgagcgcgagcgccggcgcgccacggcctgatcccatggccgtcctgcagactccctcggcggcgttcgatgaacggctgccggaactgacccggcaactggcggaaagcgccgatgcccatgaccgcagcggagattttccccatgccaacctggccctgctgcgacaccacgggctgctcgccctggccttgccgcctgcgctcggcggtcccggcgccagcctcggcgagctgcgccgggtaatcggcgcggtggctcgcggcgaaccctccacggccctggtgctgtgcatgcagtacctgcatttgcggcgcctggccgataaccccgattggcccggcgcgctcaagcggcgcgtggcgcgcgaggtgctggagcagggggcgttgatcaatagcctgcgcgtggagcccgagctgggttcgccgtcacgcggcggtctgccgggtacgctggcgcggcgtgtcggcgacggctggcagctgtccgggcacaagctctacaccaccggcattcccggcctgacctggctggcggtatgggcgcgcagcgacgagccgatcccccgcgtgggtacctggctggtgcgccgcgacagcccaggcatccgtatcgtggagagctgggaccatctgggcatgcgcgccagcggcagccacgaggtgctcttcgaagaggtggcggtgcctctggaaaacgccatcggcctgcatccccacgaccagccgccggcgccggaccaggccgtgctgcgcgacttcgcccaggctagcgcggtgttgcttggcgctctctacgacggtatcgccgggagcgcccgcgagtggctcgtcggctggctgcgcgagcgcgtgccggccagtctcggcgcgccgttggcgagcctgccgaggatgcaggaggcactcggcgggatcgacggcctgctcctgcagaaccgcctgctgctcgatgccgcgtgctgcggacagttgcccgccagcgactccgggctgctcaaggtcgcggtcatcgacaacgcgttggcggtggtcgagaaggccctggaactgagcggcaaccacggcctcagccggcacaatccgctacagcggcactaccgcgacgtgctttgcggacgtgtccacacgccacagaaagatagcgtctggagcgcggcggggagggcggcgctgagtctttgaaacgtacctcccacgattctcgaccctggccttgtcggcgaccgcaccggcggaacggatagcccaggatagccccggctccgtgcggagctgcctggagattgcccatgaaacgacccctgtgtgtgcttgccggcctgctggccgcgaccctgctggctggagccgccagcgccgccgacctcatcagcctgcgcctgggcgatgtgaagggcgaccgctacgccgccctgcgcgcgtccggcgagctcgacgacctgccgtacaagctggaaatgtcggcgttcccctccggtgcaccggtgctcgaggcgctcaacgccggggccctggacataggctttaccggcgacatcccgttcctcttcgtctacgctgccggcgcgccgctcaaggcggtgggcgcctggcacttcaacccggcgaccgtggcgctggtggtcggcaaggactcgccgatccgttcggtggccggcctcaagggcaagcgcattgccgtcaatcgcggcggctgggggcatttcctcgcccttggcgcgttgcgtcgcgccggcctcggaccgcaggacgtaagcttttccttccttggtccggtggacggccgtgccgccctggtgcgtggctcggtagacgcctgggtgccctgggagccctatacctccagcgccgtgctgctcgatcaggcgcgggtcatcgacaacggtgccgggatcatgaccggctactcctatgccctggccagcgacgctgcgatcgcccgcaagaaggccgcgatcagcgacctgctgacccgcctggcgcgtgcccaggcctgggccctgaggcatccggaggcgttcgccgaggccctggccaaggatctgaacatgccgcgcgaagtcactcggcgctgggttggcgaggcgcgcatcagtcctgtggtcttcggtccggaggttgccgccaccctgcagaccgccgccgatttcttccatgccgaaggcgtgctgccgaagtcgctggaggtcgccccggcgttcgacttcagcctgtccgccggtgccgccgaagtggcccgccagttgcccgccgacctccgcgtcggccagcgttgaggagttacggaatgcgtcagaccctgagcctgttcctgcttctctgcctgctcgtcggccaggcctgtgccgacgagcgcgtgaccctgcgcctggccgaccagaagggcaacatgcgcgcccagttggaggctgccggcgcgctggacgacctgacctacgacatccgctggttcgaattccccgccgccgcccccctcgccgaagcactcaatgccggtgcggtggatgccggcatcatcggcgacgcgccattgctcttcgccctggccgccggtgcccggctgaaggccatcgccgtcgacaaatccgatccctacggtaccgccgtgctggtgagaggggattcgccgctgcgctcggccaacgacctgaaaggtcagcgcattgccaccgggcgcggttccatcggccacttcgtcgcgctcaaggccttggcctcggtcgggctgggcgagaaggacgtcgaattccgcttcctcggcccggtggacgcgaaaatggccctcgccaatggttccgtggatgcctgggcgacctgggagccctacaccgcgttcgcggagaccgccgacaaggctcgggtactggtcgacggtcgcggcctgtgggctggcaacagcttcctcgctgctaccgatagcgcactggccgacccggcgaaacgcgccgtgctgcaggactacctgcaacgcctggccagcgcccagcgctgggcgtacctgcacctggacgagtattcgcgaagcctggcgcagatcatcggcttccccgaggacgccgcgcgcttgcagttcgaacgccggcgcttgcgttggcaggcgctggatgagcgaacgctcggccagcagcaggagaccgccgatttctaccaggcccatggattgattccgcagcgcctcgatgtgcggccgaccttcgccagcggctttgcggtcaggcaggcgtcggatgcggatctccggtaggcgctgcccgggcattaattgataactataagttatttatcgattgttttttattccaataatctatccgctccgtcgccggcagctggaactcccgtccctgcgggcgctcgcacctatcccaggagtcatcgcatgtctcgtccgttcctgcgtcgcttggccatcgtgtttgccgcttccgtcgtcctgtcgggcattggtggcgcacaggccgaggaggtcctgcgcatcggcttccagaaatcctcgactctgctgaccctgatccgcagccagggcaccttcgagcacgagttggccaggcagggcatccgggtgtcctggcatgagttccccagcggcctgccgttgctcgaatcgctcaatgtcggcaacatcgatctctccgccgacgtcgccgacaccgtgccggtgttcgcccaggcggcgggtgctcgcctgacctacttcgcccgcgaaacaccttcgcccgcggcgcaggcgatactggtcggcgaacattcgccgctgaagtccctggccgagctgaagggcaagcgcatcgccgtgaccaaggccgccggcagccactacctgctgatcgccgcgctggccagcgccgggcttgagttctccgacatccagccagcctacctgacgccagccgacggccgcgccgccttcgagaacggcaaggtcgacgcctgggtgacctgggacccctacgtggcaagcgcccagcgccagcaacgcgcgcgggtactggccgacggccagggcctggccagctaccagcgctactacctcgcctccagcgactacgccaggaaacatcctgaagtgctccagcaggtcttcgccgaactgcagcgcaccgggcgctggctcaagagccacccggccgacgcggccaaggtgctggggccgctgtggggcaatctcgatgccgctaccgtcgagcaggcgaatgcgcggcgcagctacgacgtacaaccggtgagcgcagatggtctcgacgagcaacagcgcatcgccgacgccttccacgcccagggactgctacccaaaccggtggatgcgcgcgccgtggaggtatggcagccgcggcactgagcgacgcagttgccctgtgatgcgcggcaccggcggccagcgtagcttgccgctggcgcgtgtccttcaggccagcccatagctgatctgctcggccttgacgtggaacgcctgctcacggctcggaagatgctggttggcatcggcgttgccctggcgcaggcgttcggacctcagcgttggcaggcggaacacatcctgccgctcggtctgcaacgcattgccgcgcatcagttccatcaacggaacctgcatggccggggtgctctggccgaggaagtagttgggcacctcgtcgcaccacaacagcatgtagtcgctcaccgcgtcgtgctcggcgtcgagcaccacgtactcgacgcgatggcgcaggaccacttcggcgtcgatgctccagcgggtgtccacggtgaacagcggaacgtgcttttccacgtccaccagcaggccattcaccgccttgcagccggacttgcggcaggccacgtggtagcgcttgtcggggagggggtgacgcgccaccacgtcgcgcccgccaagcaggtgcaggtcgaactccttgatgcggatgtcgatcaactcgcacggcaggtcgaaccccgcaggcgtcagcagcctggggcagaaatggataagcatggttttctccatcaggcatgcccggggctttcccgccctgggggagaggtatctctatcggtcgcaggtcagccggcaagccgcatcctgacggacgaggcagagcctcgcccggtgaaagacgcgaacgccggtcctggcggacctcgctggatttttctggctccgggcgctcccgcgcttccagggggcgtctcgggcgggtgtcagctcccggtcttgacccggctccagacccgggtacggattctctcgaccttcagtggcagggtttccagcgggaagagggtcgccatggtttccttgctcaggtaaaccgccgggttttcccgcagcttccgctctaccagcggcagcgccgcctggttgccattcggatagcccacgtagttggaggtcctggcgatgacctccggacgcagcaggtagtcgatcagcgcataaccctgctgcggatgcggtgcatccttgagcagcaccatgttctcggcccagaccagcgagccttcccggggaatgctgtaggcgatatggcgaccgttcccggcctgttcgttgttgacctgggccatgtaggccgtgccctgccagccgaccaccacgcagacgttgccgttggagagatcggtgtcgactctggaggagtcgaaatagcgaatgtaggggcgaaccttcagcaacagttcctgggctttctggtagtcctcgggattctggctgttgtgcggcaggcccaggtagttgagggcaatggacaccagctcggtggaggagtccagcgtggccacgccgcactggctgaggcgggagatgttctcctccttgaagaccaggtcccaggagtcgaccggcgcgtcggggccgagcagcttgcggaccttgtccacgtcgtaggcgatcccggtggttccccagagataaggtacggcatagcgattgccgggatcgttggcctgaagcttcccgaggatgtccgcgtcgaggttcttccagtgggggagccggtcgcggtcgagttcctggaggacgcccgccttgatcagcccgggcaggatgttggaggtgatcaccaccacgtcgtagccggagcggccgaccatcagtttgccctgcgcggtctcggcgctgtcgaaggtgtcgaggacgacacgggtgccggtttccttctggaaagccttgggcgtttccggggcgatgaagtcataccagttgtaaagatggacgctggtttgcgcagcccatgcactgtccgccgctgtcgcaccgatcgtcgtcaggatcgataacgccagtgcacaaacttttttcattggatttcctttccgaaacgaaacaagttggattttgcacctaccagaactggtagttctgacctgtggctatcttcgaaggcatcgatattatgcacattggaactcttcatgacataacgccgagtgactaatcccagaggagtagttgtgtggatatcgcattgcacggcggcgcctggcacgagtcactgggaaagttgctcgaagcgctggaccggccgttcttctggcggatcctggcgcagaccctcggccagttcgcccccgtcgacaactgggcggccctgatattcagcgattccagtcccttgattctttccttcatggaggaggagagagaagaagtcgagccggacccgctgatcagtcgatatataaccggactttatctgcaagatcctttctaccaggtatccaggaactgtcggcgcggcgggctttttcatcttgcggatatcgtctccgaagatttcgaaacgaccgaatattacaatacgtactttgcgcattatgtggtgacggacgaagttcaatataacgtcccgctggatggtgaaagaaccctatgcctgtcgttgggcagcgagagccgcttcggtgccgagcagatcgcgctgttcgagctgcttcgcccgtgggtcatcgcgctgatgaaaaaacgcatccacttcgaggatgcggtcagggaggaggcgaaaccgatcgcagcggcggaggtggaagtccagccctggagagggttgatatcgccgctgaccgcgcgggagtcggatgtcatccggctgatgctggatggatactcgaacaaggaaatagcggatcggctgacgctgtcgatcgccactatcaaggtgcatcgccggcacatctacgcgaagctgaacgtgaagtcccactccgagatattcgcgctgttgatcaacccgcccgcgccgcggctcgccgacgcacgctagtgcgccgcctgcggaggaacccgggcgcataaggttatgcgaaattcatattgcccgacgctgaaaaagccggcgtcggattgcactcatgagcgaattccatccaggacgattcgaccatgcccgatgtacgtctttcctctcgttcgttgacccccgtgctctgtgcggtggggctcgcctgcgcgctgcagggcgaggtgcaggccgccgacggtgggccgcgcgacgtggccacggcgccccgggtattcgacatagcgcccggcgaactggccgaggtgttgttgaacatcgtgcgccagggacacgtgccgatcgccttcgaccagcgcctggtggcggggttgcgcggaccggatatccgcggccggctcagtgtcgaggacgccttgcggcgtgccctggccggcagcgggctggcatacgcgcaggacgaaagcggtgccttcgtcctgcgccgcggacaggcgcctgtgcaggagacgcgaggtgcgacggtggcaccgaccttgtccaccgtggtggtcaccggcacgcgcaagagcgatgtgaaggcgcaggacagcctgagcccgatcgatgtggtcagcgctacccagctacgcagcagcggtgcggtcgacctgcgcgatgcgctggtcaaactgctgccctcgctgacccgccaggcccagccgttcaacgcctcggcgttgacccacacgcagtcgctgcgcgggctgagccccaaccatgtgctggtgctggtgaacggcaagcgtcgccacgaaacggccaatctcaatatcagcggcgggctggagaagggctccaccggcgtcgatctggacaccatcccgatcaacgccatcgagcgggtcgaggtgctgcgcgacggcgcctcggcgcagtacggttcggacgccatcgccggggtgatcaacgtcatcctcaagtccgccgacagcggcgggtcggcggccgctgacgtcgggcagaccggcgacggcgacggcttcacccatggcggcggggggaacatcgggctggccttcggcgatagcggcttcgtcaacctcaccgccgaatatcgcgagcaggagcgcacgatgcgcagcggcatcgatgagcgcaccggtcggcgcgacaacatttccatgggcgatcccgcgttccaccggcaatcgttggcgctcaactcgggtttcgggttgggcgacgatatcgaggtgtacggcttcggcacctatacccggcgcaaggcctcctcggcggccaactatcgcctggcttcggtggcgccgacgctgtatccggacggcttcacgccgcgcccgaacagcgacgaggacgactatgcgttcctcgccggggtgcgcggcgagcgtctgctggatgcctggcactgggacctgagcagtggctacggcgccgaccgtcccgatatcggcatgacccagtcggtgaacgcggcgatctaccgtgaaaccggcaacagtccgagaagcttcgacctggcgcgctaccgcaacagccaatggaccagcaacctggacctggggcgggaattcgaactggatttcctcgctgctccgctggcgttgtcgctgggtgcggaataccggcgggaaagctaccgcatcgacgccggcgacccggcgtcctactacagcggcggggcggaatccctggctggcctctcgccgctcagcgaggggcaatggtcgcggcacgcctgggcgtcctacctggacctgggtacctccctgaccccagcctgggaggtcgacgtggcggtgcgccacgagaaattcagcgacttcggcagcaccaccaacggcaagttcgccacccgttaccagttcgatccgcgggtggcgctgcgcgccagcgtaagcagcgggttccgcgcgccgtccctggtccaggagcactacaccggcctcagcgtcggcccgaccatcgcccttggcctgctggcggccaactcgccggcggcgaagatgctcggcgccgacgaactgcaaccggagaagtcgaccagcttcaaccttggcctggtactcagcccgtgggaaaacgtcgggctgaacatcgacgcctaccagatcagcatccgcgaccgcatcgtcgacagcgccacctattccggccaggaagccatcgatgccctggccgcggcggggatctcgttgccggccagtgccagtacggtcagtacccattacctggccaacggtgccgacacccgcacccgcggtgtcgacatcaccggtcactacctcgtcgcgcttggcgagtacgggcaggtcgactgggaactgtcggccaacttcaaccgcaccaccttgcgcaagaaccatcgaggcgccaacggcgagccgctgctcaatgcccagcaggtcgcctggatcaccagctccaccccgcgcagccaggtttccctcggcggcacctggagccgccaggactgggaggtcagcctgcgtctgacgcgctacggccggaccagctcggaactcgactacacggtagggccggacgcctggtcgacggagaaattcaaccatttcgtcaacgacccgaagtacatcaccgacatcgccgcgcgctaccggctcagcgccgacctgacgctgaccgccggcgccgacaacctgttcgacgtccgtccggacaagctgcccgcgcagaacaccacctatggcgacgtgctgcgctacgacacctatgcctcgcagatcggcttcaacggcgccttctactacctacgcgcggcataccgcttctagagggccaggcgtggcgcaacgagaattttccgcgaccagcggcggcgtgctgctggcgtcggtggtggcgatcatgctcgggcccaccggcatcctgctgaacaccttcagtctgttcatcgcaccgatgagcggcgagtacgcctgggaccgcgccgaggtgtcgttgctggtgacgctgttcggactggcggtcgccatcaccagcccgctcaagggctggctgatcgaccgttggggcgcgcggcggacaatgctcgggctgaccgcggccctgtcgctgccgctgctcggcctggcggcggtgaatgccgtctggcaactctacgcgctgttcctgctgatcggcctgctggcgccaggcaacctgccttacggacgtatcctcggactctggttccgccaacgcctgggcgtggcctacggcctgttaggcctgggcttcggggtgggcgggccgctgggcctgctggtcggccaccagagcctcgaagcgtggggctggcgcggcgctttcctggtctacggcgtgctcgaactgggcctggcgctgccgctgctggcctggctgttccgcgagccagcgccgggtgctggcgtggccgccggcgcggccgtagcggaaaccgcgctgagcggatcgacggcgccccaggcctggcgcagcgccagtttctggctggtgctgggcaaccaggtactggcggtgttcgtgatgtccgggatcatgacccatggcgtgccgatgctggtggagcgcggtttgtcccggggcgaggcgggcaccgcgctgtcggcgttgtgggtcggcatgatgctgtcgcagccgctgatgggctggcttctcgaccgcgtggcgacgcctcgggtggcgttgcccttcgccctggcggcggtgctcggcatggcctggttcctggtgggcgacacaccgagcggtctatggctggcggtgttcctggtcggcctgggtggaggaggggaaagcggcaccaccaagtacctgttgatgcgctacttcggcctgcgcagcttcggtgtgatctacggttcgatccagccgttcaccttcgccctgtcgatcagtctcggcgcttacctgctgggctggctgtacgaccgcgccgaaggctacgggacggccgaatgggtgctgctcgcggctttttccctggctgcgtgcagcctgttcgcctttcgcccctatccgcagaaattgccctgaagggaatcatgccggctagcgttcgccctggcgccgcgcggtcttgccggcgaggcgggcctggcgatagtcgttggcgcactgtcccgtccagcgacggaaggcgtggcgaaaactggaggtatccatgtagcccagcctctcggcgacttcctcgatgcgcagtcgctcgtcccgcagcagttggcgcgccctgtcgtggcggaccaggtcgagcacttcccggtagttggtgccctcgtcggcgagccgtcggcgcagcgtccgttcggtgaccttcaactgccgggcgacccaggcgatgctcgggtagcggtcctgtagcacctccagcagtgccacgatgcgttggcggtagccgcccatctcgcgggtgacgcgggtgttgaaggccttgctgccgagcgccagcgaggcctggaacacggcggagttggcagtggcgatctcggcctcgagcaattcctcggggagggtgaaggtgatgcctgcgccggcgaaatacaccggcacccggaaatactcctcgtatgcccgcacgtcgccgttcctttccgggaggcgcaggcggaccagttccagctcgcccagcagcaggtcgcggaacaccgcgtaggcggccgacgccaggacgttggcgtgatacagccgggccgactgcggccagtccggcttgtcctgcaggtcgatatccacatccacggtgtcgcaactggaacgtcgcaccgcgatcccgcggatatccttgcggaacagcagcatgttggtcttgatcagttgcaaggcttcgcccacggtgccggcactctgcaatgccagcccggcgacgccgtagtcggaaaggcggtagtgctcccccaggctcaggccttccaggggggagcgtccgttcagcacgatccactcgtagagcgcttcgctgggcaggcgcggctcggcagccgaaccctgacgcatgtccggaggcgtgatgcgttgcacggcgaggtagttgttgagtggtcgccactcgaaatcgtactggatgttttcggacgggctcatcggttacctcttgcacgcgatgctatcgccctgaaggcgtcagggcttcgttattccatgcggatgtcgtttcggttgattttcgtacgctgggcttccggcaatcactaccttgcgtaaggggttgacaggagcggggtctgcgtatagccgcgcctccgcgacgccgtgccgatcggtcgtgcatgcttgccgtggcccggctgagcactgccgtcccggccactctcgccggggtggctgcgcctggatgatcgtcgtgggcggtggtggcgcgggccggttgccctgagcttcaggcgccatcgccgcttgccggcgctcgggaggccgctggccaaggaaaaccgtagcgccgcggcgggcggcggctagcggggatttccggccacgcgtgccgtgcccgggcctcgcttgccttcccggcgcgccggactcccggtggcctggaggacaggaaaagcgagcggcgaggtgtcggcgagcagggtcaactcgatcttctgatagggtcggtgggctgtccggggcggctaggatggacattttcatcgtctcgggcaggcctgtcgcgaccgcgcgaagtcgcgacggatgccgctgctaaggagcaacggatgaccgttcttatccagggggccgggatcgccggcctggcgctggcgcgcgaattcaccaaggcaggcatcgactggctgctggtcgagcgggccagcgagatcaggcccatcggtaccggcatcaccctggcgagcaatgcgttgacggcgttgtccagcaccctggatctcgaccggctgttccgccgtggcatgccgttggccggcatcaacgtatacgcccacgacggttcgatgctgatgtcgatgccttccagtctgggtgggaattcccgcggcggcctggcgttgcagcgccacgaactgcatgcggcgctactggaggggctggatgagtcgcgcattcgggtcggggtctccatcgtgcagatcctcgacggactcgaccacgaacgcgtgaccctgagcgacggcactgtccacgactgttcgctggtggtcggtgcggatggcattcgttcgagcgtgcgacgttatgtctggccggaggcgaccttgcgtcattccggcgaaacctgctggcgcctggtcgttccccatcggctggaggacgccgagctggcgggagaggtctgggggcacggcaagcgcctcggcttcatccagatcagcccgcgcgagatgtatgtctacgcgaccctgaaggtgcgccgggaggagcccgaggacgaggagggcttcgtaaccccgcaacggctggccgcccactacgcggacttcgacggcatcggcgcgagcatcgcccggctcataccgagcgccaccacgctggtgcacaacgacctcgaggagttggccggcgcctcctggtgccgcggacgggtagtgctgatcggtgacgccgcacacgccatgacgccgaacctggggcagggcgcggccatggccctggaggacgccttcctgttggcgcgcctgtggtgtctggcgccgcgcgccgagacgctgatcctgttccagcagcaacgcgaggcgcggatcgagttcatcaggaagcaatcctggatcgtcggccgccttggtcaatgggaatcgccctggagcgtctggctgaggaataccctcgttcgcctggtgccgaatgccagtcgcaggcgcctccaccagcgtcttttcaccggtgtcggtgagatggccgcgcagtagccgccggtgccagtggcgtcttggtcgcctgttttcgacttcggcgatggtcgctatggagaagtcccgggcaaccagggcgcttgcgctttaccaggcccggcgtcgctgggctctccacaggttcgccggtttttgctgcgatccggtctgccgctcgccgggggctggcggtatacttcgcagcgcccgttcgatgccgtcgaatgatgtttccatgacgcttgatttatgacgcctttgcgccaagctaggtcatgggatggctttctgttaaggttgccgaaatctcctgggggcccgtgtgggcggttgtctgctaatgcgcgacgaggtgcagcgtgattaaggtgctggtggtcgacgaccacgatctggtacgcaccggtattacccgcatgctggccgacatcgaaggcttgcaagtggtcggccaggccgactgcggtgaagactgtctgaaactggcccgcgaactgaagccggatgtcgtcctgatggacgtgaagatgcccggtatcggcggcctggaggcaacccgcaagctgctgcgcagccagcccgacatcaaggtcgtggtagtcaccgtctgcgaagaggatccgttccccacccgcctcatgcaggccggcgccgccggctacatgaccaagggcgcggggctggaggaaatggtccaggcgattcgccaggtcttcgccggccagcgctatatcagcccgcagatcgcccagcaactggcgctgaagtccttccagccgcagcagcacgattcccccttcgattcgctgtccgagcgcgagatccagatcgccctgatgatcgccaactgccacaaggtgcagagcatctccgacaagctgtgcctgtcgccgaagaccgtgaatacctatcgctaccgcatcttcgagaagctctcgatcaccagcgacgtggagctggcgctgctcgccgtccgccacggcatggtcgatgccgccagctagatgagcgccgttttcgacgcaagcgctttcctcgctacctgcagcaatcgtccgggcgtctaccgcatgttcgatgcggacgccaagcttctctacgtgggcaaggcgaagagcctgaagaagcgcctggccagctatttccgcaagtccggcctggcgccgaagaccgctgcgctggtggcgcggatcgcccaggtggaaaccaccatcaccgccaatgaaaccgaggcgttgctgctggagcagacgctgatcaaggagtggcggccgccctacaacatcctgctgcgggacgacaagtcctatcccttcgtgttcctctccagcgaggacgagtatccgcggctgtccctgcaccgtggcgcgaagaagcgcaaggggcgttacttcggtccctatccgagcgcgggagcgatccgcgagagcctcaacctgctgcagaaggcgtttctcgtccgccagtgcgaggacagctatttccgcaaccgtacgcggccctgcctgcaataccagatcaagcgctgcaaggggccctgcgtggggctggtcagtcctgaggagtacgccgaggacgtgcgccactcggtgatgttcctcgaaggaaggagcaacgcgctggccgacgagctgaacgtcggcatggagcaggcggcgatgcgcctggacttcgagaaggcggcggagttgcgcgaccaggtggcgatcctgcggcgggtccaggaccagcagagcatggaaggtggcaacggcgacgtcgacatcgtcgccgccatcgtcacccctggcggcgcttgcgtacacctgatcagcgtacgcggcgggcgggtgctgggcagcaagaacttcttcccgcaggtcgcgatcgaggaggaggtgggcgaagtgctgctggcgttccttggccagtactatctcagccaccaggagcgcgacctgccggcggagttgatcgtcaacgtgacgcacgaggatttcccggtgctggtttcggcgatcgccgaagcgcgaggccgcgaactggagatcagctaccgggtgcgtggtacccgcgcccgctggcagcaactggcggtgaccaacgccgaacaggccctgggcgcacgcctggccaaccgccagcatgtggcggcacgcttcgaagcccttgccgaggcgctcgacctggcggagccgccgcaacgcctggagtgcttcgatatcagtcactccagcggcgaggctaccgtggcttcctgcgtggtgttcggcccggaagggccgctgaaatcggactatcgccgctacaacatcgaaggcgtcacggccggcgacgactacgcggcgatgcaccaggcgctgacccgccgcttcagtcgcctgaaggacggcgaggggaagatgcccgacattctcctggtggatggcggcaaggggcaattggccatggcccaggaggtgctccaggaactggcggtcgccggtctgatcctgctcggcgtggccaagggcgtgacccgcaagccggggctggaaaccctctacctgaacgatgcctcccacgagttcaccctgccggccgattcgccggcgctgcacctgatccagcagatacgtgacgaagcgcaccgtttcgccatcaccggccaccgtgcgcggcgcggcaaggcacggcggacgtcgacgctggaggacgtccctggcgtcggcccgaaacgtcggcgcgacctgctcaagcatttcggcgggttgcaggaattgtcgcgggcgagtatcgatgaactggccaaagcccccggtatcagtaaaaagcttgccgagcagatttatgccgtcctgcacagcgagtagaatgccggctcacctcgcagcctagatggtccgatgaatatccccaatctgctcacgttactgcgcgtcctgctcattccgatcttcattctgctgttctatctgccgacgtcctggagctacctgaccgccagtgccgtgttcgccctggccgccgccaccgactggctggacggctacctcgcccggcgcctcggccagagcacgccgttcggcgccttcctcgacccggtcgcggacaagctgatggtggcggttgcgctggtcttgctggtggaagagcacgccaacctgtggctgaccctgccggcggtgatcatcatcggccgcgagatcgtggtttccgccttgcgtgagtggatggccgaactgggggcgagggcgcaggtcgcggtgtccaacctgggcaagtggaagaccgcggcgcagatgctggcgctggtcattctcctggcgaatccgccgctgatgaccttctgggtgattctcggctacgtgctgctgatcatctccgcggcgctgaccctgtggtccatggtgcactacctgctggccgcatggccgcatctgtcgaccaccccgaaagagaaataaacttttttgaatcaaggagttgacacggcgccgcgatgctatagaatggcgcccgtcaccaagacgatgcgggaatagctcagttggtagagcacgaccttgccaaggtcggggtcgcgagttcgagtctcgtttcccgctccaaatatagatctatagagttccaatgaagtctgtagatcattgagaaagggccttcgggcccttttttcgttccgcctccaagtcccgtacccgttcgtggagcgtccgcgccgaggggcggttctccttgccgctttcccggcgaccggggccgtacgtttcgcgaagcccttcgtctcgccagcgaggcggcttgccgcaagatgctgcctcggcacatcagaagtgtggctgtcgcactccaggggggctcgattcattgcaccttggaccgccttcgtgcgcctgttgctttggctgccacgttcgaccgagccgtcccaaggccagcgcttcggtatcgcagcgcttcgacgaccactgagaaggtcggcgaaggttgcctctgacttgggtgatggaggtaatagcccgggaatggatcgcaccaaccttccagcacgctaccagttgccctcggcgatgtgcggctcgaactgggctttcgagtgcaggcatgccacggccagggcgcacgtcatcgcaagcggcttcatcgatctagccggcgacgcgaaagagtcgagggttttcgcgagccgggcataaggcggctgtcagagcgagtgtcgacaggcgtgggttcctgggaaaagtatccatctacctgctaacatggcggcatcgttgccgatgtgtccgcaggctctgggcgcggatgccatgccctctatccggccggagaactttgccatcgtagactcgacatgctgacaaggtcgttgctgtccgcggtcttttgcctgttgctgatcgctctgcagccgctgcccgtcgaagccgaatccatcctgccggatgggcgtacgacgacaacgatgcgtccctggctcgataaacgagccaggcagtggctggatgcacgggagccgctgacggtaggcgtggtttcccccgactatccgccgttgtccatcttctacgcaggctcctacaagggcttcacggccgattacctggccctggtgttcgagcggccgttgcgcgtcagggactttccgtcgcggcaggcggcaatcgacgcgttgtcgcaaggggagatcgacctgcttggcgtcggtagcgaggtcgaggcccgacaacacggcttgctggcatccgctgcgtatctttccgaccggccggtactggtgtcttccagcggtgccccgttcgattcgcaggcggagtcctggctggccacggtcaagggctatcttcccgccgaacgtatcaaagctgcctatccgcacagcaggatcatctggttcgactcgccgcagcttgccctggaagcgctgagcatgggggatgtcgatggcgtgctgggggacgcagtttccacgcactacctcatccagacccattacctgctgaacttgcgcatcgagaacttcgcacccatcgacagccagggtttccgtttcctgctccggccaggtgacgaacctctgctcgcgctcatcgatcgcgccctgccgcatattagcgggcgctacggcgacgaactgttgcgcagctggagcgccgggcggcgcctgcgcttcgacgagccccgggtgacgctgtcgccggcggagcagcgttggctctccgcgcacccggtcgtgccggtggtgatcaaccattcccttggcgcgctcgggcaactggataacgaggggaggctgagtggtatcgggcgtgactatctggacctgatcggcaagcgcagtggcctgcggttttccttcactggagcacgcaacttcgtcgagacgaaaagtcgactggatgcggaggaggcactggttacgccgaccatgccttcgtcggagcgcttcgattccggcctcgaagtgctgacgccctatctacgcagcgccacggtgctgatgggcgcccgccagggtggccgggatgaaagggtggggcgtgtccatggcctcgcggacctggcgggcaagcgattggcgacgacgattggctattttctcaacgacttcattcgacgcgaacacccggagatcaagctccaggtctatccgaccttcctcgccgccatgcgcagcgtagacgccggccagagcgaggccgccatcagcagcgactataccggtcgctatctgtccgcccagcatttcgacaaccggatccaggtcgtcggtatcctcgatgacctctccatcccgatcagcatcggcgtggcgaggaaccagccggagctgcagggcatcctggagaaggcgcagctggcgatcgctccggaagaagtggcggaaatcctccaccgctgggagcctcgcttcgccaagggaggggcggacttctggcgcgatcaccggagcaagattctgcagatcggcggattgttcggcgtactgatttccatctccctcatctggggtttctacctgatgcgccaggtgcgcaagacccgccaggcagaagagcaagccgacactgccaaccgtgccaagagcgtgtttctttcgacgatgagtcacgagatccgtacgccattgaatgcggtcatcggcctgcaggaactggtgctgaaaaagggcgagaagggcgtgttggacctagattcgctgagcattgcccaagaggcggcccaggggttgctgcttctgctgggcaatattctcgatttgtcgcggatcgaatccggtcggttcgattccgctcccgaaccagtgcttcctggcgagttgatcagaggaatcctgccgctggttggtgggctgacgcggcagaagaatctttccctggcactggaactcgacggggatctcgagcaatgggtgctggtggatcccctgcatttcaagcaggtgttgttcaacctgctgggcaatgccatcaagttcaccgagcgcggaggggtaacggtgcgggcggtggggcggcgcgaggcggagaggcttcatttgctgctcgaggtaagcgacaccggcctcggtatttcggaggaggaccaggccaggctgttccggccattctcgcaggtcggctcgcctgcgcttggccaggcgtccggcagcggcctggggttgtatatcagccgacgcctggtgcacctgatgggcggccagatcagcctgcgcagcgaactgggcaacggctcctgcttctcggtcgagttcgatcttccgctgaccgagcctccgcccagcgagtccagcgaagcgcgttccggagttgccgaggtcgaggagcggaaagaggcaagggcgctctcgatattgcttgcggaagaccatccgttcaatcggctgaccctgaccatgcaattggaaagccttgggcaccgggtgacctccacggaagatggcgaggaagcattcgaacgttggcagggcgaagacttcgacgtcgtgattaccgacggcatgatgccgcggatggatggctacgagctggcgcgacggatccggtcgcaagaagcccttggcggtcggcgtcgctgcttggtgatagcgcttaccgccagcgccgagaaggatgcgctggagcgttgcctggctgccggcatggaccgggtcctgttcaagccgactacgctcgatgagctcgctcgggcgctgaacgggggagagccgctcatgcctacgagcgtcgattcgcaatgaaagtgcccgactggttgccgttttgcgtgccgcgagcggatgtatcgggtaatctctcgcagaaatgaaccagcactagtgaagcgaacgatgggttttgaacaacttgccgagctgagagaccgtctgcgcgcacaggcggcgcaggcgaaaccggctcaaaccaaaagctccgcgggacgcgcgaagaaacgtgaagccgtcgagccgggagtcgaggctatctggaggctgcaacggcattttccgctggcgtttccgaaaagtcccgcggccaaggttccgctcaagcagggtattctccaggatgcgcagcagcacctcgaactactgggaatcaccgccgaacaactgaaacaggccatcgccacctggtgccagggcagccgctactggagttgtatggtggaagatgcgccgcgactggatctgcaaggccaggttgccggcaaggtaaccgccgagcaggcggtgtatgcgcggcggcaggcgtctcgccggcagcgcgagcagatgcgcgagaagcgcgccaagcgtgcacaggcgggtggcgaagcgccggccgccacggaggcgccgacgcctgaagcgcccgcaaccgaagcgagccccgaggcgaactgatcgccggggcagggcgcgtcggatcctggcgcgctcctcggttgccggtcgctgcgggcccatttcgcggacgtctgggcccgtttctcccggcttgtgctacgcaatagcctgatctgcaaagtttttttcgtagagcgcttgccaagctcggcgaatccgtccataattgcgtccattccagcgatgggtgagctaaaaatcttttgaaatcaaagggttataagttcaaaatcgcgccaggaaagaaatttcagcgatatgccaaacgcatgtcgcttcgctcaaaggctgagtagcagagtggttatgcaccggattgcaaatccgtgaacgccggttcgattccgacctcagcctccaacaggaaagccccgtagctcagtgagttacggggcttttttctttcctgtccggtattgctgaagcaagttccttggggtgcccccataacgctttcatacttttacggtctcgcaaccgcctccctttcccgataaccgctccgtaattgctactttcccggagtgtccgaggagtaccccagcacctgtcacgttttcggccgttgcctgcaatccagccccgtgcgcggctttcatctggacgcaagatccggtctgggtcggtcatcggctggtcgtcatcgaacatgaccagccgagccggtctgtcctgccgcctgccttccgggcctctatcgatcaaccgttgtggcgaccgcgagcggaaggcgctcggcggagggcccgtttcatcttgccttgcgtttcaaggaaaccggcaggccccaggtcaggtcttccatgcctgcttcgccgagtatctcggttttcatcggctggatccgcgcgagcacctggcggcccgtttcatccagccttggctgctcgcgatcgatgaaccttttcgtcagttccatgggcgctggcctcatgaagacctggatatcctgcaaggcgcacttgatgttttgcgtgtccacggccttgcaggtcttcctgtcatagctcacggccggggtcttcaagtggaaccgatcgctgagcaggatctgcccaggctgaatggtgaaggacagcggggcataggcgtcgggtatctgcgcttgcagcttgatggagggaacatcctcgatcttcgtgccttcggcccaaccggcatccgagaccatttcccgctggctgtattgctgctcggtccagcccacgcattggccggaggccatgtgcacggcgctgcagacattctgtgtgtaggttttgtctgcataggaggcgtcgcgccagtagttctccttcacgaaccggcgatacagcacggcggacaggttcaccgaaccaagtgggctggcagccggctgcccctttggcgccttgatctgggcaagggtgctgtcgatcttgtagtcgatccctccggacagcaggtaggttcccggcgggacgatgttgacctcgaggaagtcccacagatagacggcttccttgatcttctccaggtcgttgttggcaaaggcctgcatgtaggcgatcccgggcacgtccttgttcttgaatatgacccgatgcgagtagctggagaggtccgtcacgctcttgttgggcatgagtgccggtaccagcaccacggacataccttcgcgtgtagcctcatcgatcatgttcaggagctggttggtggggttctgctgggaaccgccgagtccggcgttgcctagggaggcgcaggctgacaacaggcttgccgggagcaggatcgcgaaggggctcagacgccgagcgatggttttcatgagatatccttatctatacgggccaatgacttaaggcgagtgcgggaagaatcctaatctactccttgcggattcccaaggagcgttcgtcccgcgcgtaggaaggagcgtttgagtcgagcgcgtcacagcctgttgctgcaatcctgggtactcacatgcgttcgaatgctggcgagccagtgcgtactgcgttggtgatggctcgctgcgggtagagttcgtgccggtcatcgagggctggctgcgtgggggcgcaatgaagacgcgcatcccagctcttctggcgattcgtgagtgcggatcaaatctgttttaccgccgtacgactttttccgttccctgcgcctatctaacctgccgctctcttcaacccgggatcggcaggcatctccgctgcggttccagcatgtacggaacaccatgaaaaacattctcctgctcaacggcggaaagcgtttcgcccattccgacggtcgcctcaaccagaccctgcacgaaaccgccctggcccatctggaccgccgtggcttcgacctgcgccagaccttcatcgacggtggctatgacatcccgacggaggtggacaagttcctctgggccgacgtggtgatctaccagatgcccggctggtggatgggcgccccgtggacggtgaagcgctacatcgacgaagtcttcacggccggtcacggcagcctctatgccaacgacggtcgtacccgctccgacagcacgcagaaatatggcagcggcggtctggtgcagggcaagcgctacatgatctcggcgacctggaatgcaccacggcaggcgttcgacgatccgagcgacttcttcgaaggaaaaggcgtggatgtggtgtatttccccttccacaaggccaaccagttcctcggcatgtccggcctgccgacgttcctcgcggtggatgtgatgaagcgcccggacgtcccggctaccgtcgctgcctaccaggcgcacctggacagggtgttcgggcgcgccggctgagttcgacggcgggcctcgtgtcgcttcgctggatggagtggcgggtcgaaatccaggctctcgggacgaggcctaatggtcacggatccgctatccgggcttttctcggccacgacccgcgagtgatccgaaattcgatttttccatcgatccgtcgaattagatttcatcggggacgggcaggaaaggatgctttgcacgaatattcgaatgggcgcatcgtaaaatgagcgcgcttcgaccgtgtcgaagccacccccgacaacgttgccggcaggtcgctcatcgacttccgacgcctgccgccgaattcaggagattcacatgtgtccttgccctcactcccaggcccagggagaagcggacggagaggctgagtggcataacgccgccctggacttcacccatgcgatgagctacggcgattacctgaagctggacaaggtcctggacgcccagttcccgctttcgcccgaccacaacgaaatgctgttcatcatccagcaccagacctcggagctatggatgaagctgatgctccacgaactgcgggccgcccgggagcacgtcaagtcaggcaagctcggtccggcgctgaaaatgctcgccagggtctcgcggatcttcgaccagctggtacacgcctgggcggtgctggccaccatgacgccgaccgagtacaacaccatccgcccgtacctgggccagtcttccggtttccagtcctaccagtaccgcgagatcgaattcatcctcggcaacaagaacgccaccctgctcaagccccatgctcaccgtgccgagctgctggcggccctggagcaggccctgcatacgccgtcgctatacgacgaagcgatccgcctgatggccgcccaggggttgccggtaagccaggagcggctcgcccgggacgcggcggccggcacctgttacgaggcctcggtggaggcggcgtggcgacaggtctaccaggcgccggaacgctactgggacctgtatcagctggcggagaaactgatcgacctggaggactcgttccgccagtggcgcttccgtcacgtgaccacggtggagcgcatcatcggtttcaaacccggcacgggcggaaccgagggagtggggtatctgcgcagcatgctcgataccatcctcttccccgaactgtggcggctccgttccaacctgtagtaccggatgaggcgcagcatccgcctgcgcctcagtcgttgccggcgcctcccgccgcccactcttgccgcaaaagccccatgagaacgacattccagcgttcccggccgacccgggtggcggagcggcgcaagccttcttcgcggaaccccgcgcgtcgatagagatgacgggcggcagcgttccagtcgtacacgttcaattcaacgcgctcgatgtcggcgtcggcgaaggcctcggcgagcagcgcctccagcatcggtagccccaggccctggccgcgcgcgcttggcgccaggactatgcgagccaggcggacgacgccgttgcggcggtcgaacagcaactggcaatggccgatgacctggtcatcccggcaagcgctccagagcaggcgcagcggcggtcgccggcggctttccgcgaggtcttcatgcatctgctcgaggctcagcggatgccgcagggcggggccggcccattgcaccagctccttttccgtggcgaaccagcgttgcaggattgggaagtgtcccagctggaatgggacgagttgcaattccgggacggaacccgtgccgggtgtgggcatgcggagtgcctcgctcaggtcatcggggggagccggcgtttaaccggggacttcttgacgatggcggtgttggtttccgcgtagccgttgatcctgtccagcagcgtgtcgagctgttccatcgaacgaacctggaggcgggcgatgaagcagtcgtcaccggtgaccttgtcgcactcggtgaactcggcgatgtcctggatctgtcgctcgacctcgtgcagcctgccgggcagggggcggatgcgcacgatcgcctggaactggtagccgaaacagcgggggtcgacatccagggtgtagccgcggatcacgccgcgttcttccagcttgcgcaggcgttcggcgacgctcggggccgatagcccgctgacctgggcgagagccttgagggacagtcgcgagtcagccatgagggcgttgatcaggcgttggtcgatgtcgtcggtcatgtcggcctcgaaagttttttttcaaaatagccctgataaaaaaggtcgtcacgggtttttgcctgagtaatgcgatggagggctggaagacgactttggataatcataggcctgtcttgcgggagaacgcccatgaacgatccgatccgtcgcggtacgctggaaatgacttcggccatgctgatctgcggcaccattggctggctggtgctgctctccgggcagcccgtgctggacgtggtgttctggcgctgcgtattcggtttcgccacgctgctggtcgcctgtgccgcgctgggtttcctgcgccgcggcagcctggggcgcgaggcgttcctgctggcgctcctcagcggggtgttcatcgtcggcaactgggtattgctgttcgcatcctactcacgggcttcgatcgccatcggtaccgcggtctacaacgtccagccgttcatgctggtggggctaggcgcggtgtttctcggcgagaaggtcacggcgcgcaagctgggctggctggggctttcgttcgccggcatgctggcgatcgtcagcgcccacggcgacagcgacgccccgcgcggggactacctgttcggtatcctcctggcgctcgctgccgcgctgctgtatgcctttgccgcgctgatcgtgaagcgcctgcaaggcacgccgccgcatcttatcgccttgatccaggtgggcaccggcgtgctgatgctcgcaccgctggcgaaccttgccgaactgccccgggacgttgctccctgggccagcctggcgaccctgggaatcgtccataccgggctgatgtacgtactgctctacggcgccattcagaaattgccgacggcgctgaccggtgccttgtccttcatctatccggtcgcggcgatcctggtggactggctggtcttcgaacatcgcctgagcctggcccagtggcttggcgtggccgccatcctgctcgccgcggcaggcatgcagcagggttggagcgtgcgcctgccgaggccggcggtgcgtcgcggctgaggcgcgggggaaagaaaaagccccgcgacgaggcggggcttttctacggcgatctcggccgatcagttgccgaagaccttgaagcgttcgctttcggcgatgaaggctttctcccccgccggagcggcgatggcgccgaaaggcatctgtgcgcgcagcttccagctttccggcaggttccaggtcttgtgggtctgcgcatctaccagcgggttgtagtgctgcaggctggcgccgaccttgtgctcggcgagggcggtccagaccgcgaactgggccatgccgctggcctgctccgaccacaccgggaagttgtcggcgtagagggcgaactgctcctgaagctggcgcactaccgtctggtcttcgaagaacagtacggtgccggcaccggcggcgaaggaattgagcttggtttcggtggcggcgaaagcgtcggcgggaacgatcttcttcaactcgtccttggcgatgttccagaactgctcgtgctcggcgccgaacaggacgaccacccgcgagctctgcgagttgaacgcggaagggctgtgcgagacggcctccttgaccagttcgacgattttctcctgggagacgggcagttgcttgtccagggcgtagatggtgcggcggttcttgatggaggagaggaatgcgtcagacatcgtgaggctccttgtttggaaattggattcgatattagcgacggcctcgatgagatcaatgggaaataaccggtgattcctatcggctgatgcgatggatacccggcttccccaggaaagccgggtatccacggtccagcgcggccggcagcgagagacggccagtacggatgaaaatggaatatcgagaaagtcgatgggcataaaaccgcgaggacttggcctttgattcaggtcaagcagggtgaaggcgggggaggcggccaacctttagtgatggtgacctggcagcccggctcggtgatggttcgattgtaggattgtcggacaaaaactggagcgcacgatgtttgaaaatttctctcccagcaccatgctggccatcaagaagtacgcctattggctctggctgctgctggcgttgtccatgccgttcaactactggatggcccaggacagcgcacatccggccttctgggcattttccctggtgattgcggtattcggcatcgggccgctgctggacatgctgttcggccgcgacccggccaaccccgacgaggaaacccagacgccgcagttgctcggccagggctattacgtattgctgaccctggccacggtgccggtgctcatcggtacgctggtgtgggccgctggcgtgttcgtcgctttccaggagtggggctggctcggccggttgggctggatcctctcgatgggcacggtgatgggagcggtggggatcgtcgtcgcccatgagctgatccacaaggactcggcgctggagcaggctgccggcggcatcctgctggccgccgtgtgctacgcggggttcaaggtcgagcatgtgcgcggccaccatgtgcatgtgtctacgccggaggacgcttcgtcggcgcgtttcggccagtcggtctaccagttcctgccgcatgcctacaagtacaacttcctcaacgcctggcgccttgaagcggtgcggctgcgcaagaagggcctgccggtgttcggctggcagaacgaactgatctggtggtacctgctgagcctggcgttgctggtcggtttcggttgggcgttcggctggctggggatggttttcttccttggccaagcgttcgtcgcggtgaccctgctggagatcatcaactacgtcgagcactacggcctgcatcggcgaaagggcgaggacgggcgctacgagcggaccaaccatacccactcctggaacagcaacttcgtcttcaccaacctggtcctgttccatctgcaacggcattccgaccatcatgccttcgccaaacgcccctatcaggtcctccgtcattatgacgatagcccgcagatgcccagcggttatgccgggatggtggtgctggcgctgatcccgccgctgtggcgggcggtcatggaccccaaggtgcgggcctactatgcgggcgaagagttccagttgacggccgaacagagcgagcggccggcagcttcctgagaatggccggcgtctcccgctccgtgcccgaatagctcttcgttcgggcagtcccgccttgcctggggttgactatccttagcgatatctcggcacggaaaggagcccagggatgaacattcggcagaggatcctcgcttcgggcgccatcggcatcgtggctgtggtgctgctcggcggggtcggcttctgggggcaattgcggttgggcaaggcactgtcggagaacgagctgagcgtcaatgcgctgcgcaaccacatggaaggcgacatgatgcacgacgccttgcgcgccgacgtcctcgcggcgttcgtggtccagcccggcgacggcgcggcggccgagcaggtccgcgaggacctgcaggagcacagccagtggtttcgcaaggtggtcgagcagaaccaggggctgcctctcaacgacgccatccaccaggcgctggtcgagttgcggcccgacctggaagcctacatcggcgccgccgagagcatcgtcggcaaggcgttgcttgatcccgtggcggcgcgggccgagctgccgcagttcgtccaggccttcaaggagctggaagggcgcaacgaagcgctcagcagcctgatcgagaaacacgtcgagcagaccaaccgggcgcgcgaagacagcatgcgctattccgcctggatgctcgcgggcggcatcctggtcgcctgcctggtccttggacagctctgtcgccagttgctgcgcgccgtcctgcagccgctgcgcaaactggtctcatcggcccgggtgatcgcccagggcaacctgcaggagccgatcggcgtcgacagcaatgacgaggccggccagttgcagcgggcgttgggcgagatgcaggagaacctgcggcagatgatcaccatcatccgccaggaaagcgaagaactccacgacacctcccaatccatcggccagacctcgcagtcgatcgtccacggcgccagccaacaggccgacagcgccaccagcatggccgcgagcatggaagagatgatcaccaatatctcgcagatttccgaccacgccgacaacgccagggtgatctcggccaagtccgaggagctggccagcagtggcgggcaggtgatcctcaacgtggtggaagggatgagccgcatcgccgacgtggtcaaccagtcctccaccagcatcaccgctctcggccagtcgtcggacgagatccattcgatcatccaggtgatcaaggggatcgccgagcagaccaacctgctggcgttgaacgccgccatcgaggcggcgcgggccggagaggccgggcgcggtttcgccgtggtcgccgacgaggtacgcgggctggcggcgcggaccacccagtcgacccaggagatcaccgcgatgatcgagcgcatccgcgccagcacggggcaagcgatcaacagcatggaggccggcgtgagccgggtcaacgagggggtgtcgttcgcccgccaggcaggggtgtcgatcaacgagattctcgatggaacccgtcatgccgcgtcggtggtcgatgagatttcccagaccatccgcgagcagtcgcgcgccagtgatgaaatcgcccagcgcgtggaactcatcgcccagcgttcgcagcagaacacccaggcgatgcacgagatggccgccaccgccaggcgcctgaacgaggttgcagcgaccatgcgctcgtcggtggagcgcttcaagatctgacgggagccgcctaggtcgtcgactccgggaggcgcacgaacagcgtgtagcgtgcgccttcgatcgcttcgaaggcgatcagcttctcgatcagcgccaggttcaggaccttgcccgcgttgagcagcagcatgccgttgttggcggtgaggttgcgcgccagcaccatgcccggaaccaggtcgcgggtgccatgggcacggacttgcggatcggccagggtgacatcggcaagggtcgtcgcacagacctggatgaacggttcgatcagctcggggtcgtacagccggccggcgtatttgcggatgtacatcagtgcttcgtcgcgattcatgcgccgttcgaggatcagtccgcgctgcagctcgacgaaatccaccgccagcttcaagaggcgcgagcccaggggaatggcctcgcccttgaggtggtccggatagccgctgccgtcccagtgctcctggtgatggcgaatcaggcgggcggcgtcctgcatcggttccagcgacatcagcagcgactcgctgagttccgggtagccgcggaaacgatcgcggtcgtggtgatagagcaggtccgagggcgagctgagcagggtgtcgttccagcttagcttgccgatgttgtagagcgccgcggccatcgccaggtcgcgaccatccgattcgtcgacgaggccgctggcacagcaggcgcggaccagttcgatgatttgctggttggtctgcttgtccttgggcaggcgctggttgaccagcagcgagaagacttcggtgccgaccacgtagctgcgctttagctcctcataggcgaggtcgagcatgtcggcggtctgctgcagttcggcggtgcgcgcctgaacgcgcttttccagcgtggcgttgagttgctggaggcggtcgttctgctcctgggtaagtcgctccaggcgccgccgctcgcgctcggaatgcaggtattcgagcgactggcgcagggtcagcagcaactcgtcgtcgttccacggcttgctcaggtaatggtggatgcgcccttcattgatggccttggcgatggttggcaggtcggcatggccggtgagcaggatgcgaatggtttccggggagcggcgatggatttccgcgagcagggcagcgccgtccatgttcggcatgcgggcgtcggacaccaccaggtccacgggccggctttccagcagttgcagggcctgttcgccgctctccgccagcaacaggtcgtagggctggttgcgtagcagccggcgcaggctgctgaggatcagcggctcgtcgtcgaccagcagcacgctgaagcggatctccgtctcgttggaaggaggtgcgctatcgttcatgagtgtctgtccaccgggtgagttttgcctgaatacttcaggcaagcatagtccgagtctggcctggacgagggcgcatgcacgcggcggctgggcgagcggaggtgcggatcatggagacgttacccatcaggaaccggcgcttgctggtgatcgatgagcggcaggcggatcgagaccgtgtatgcgggttgttgcagggaaccctaggggccgaatcgcctcccgtggcgcctgagcggggctaccaggtggatacggcgggaagcgccgaggaggcattggggcggatacgctcggccctccaggccgatgcgccgtatgccgtggtcttcctcgggatgccgtcggtaggcgcggatattcccgttctcgagcggttctggcgtctcgactcccgcttgcaggtcgtggtgcatgcgcctcccgccgattttccgctattggcgccgtgggctgcggaagagcgcctgctgctcctcggcctgcctttgcagggacaggaggtccgccagatggccggcaatctcagcgccaagtggaacgtgacggctcacctccagttgcagatgagccggatggaggctgccatccaggagatcacccgggaagtcggccaggccaaggaggcgctggagaaagagatcggcgagcgcaaggaactggaaagccaactggtgcagacggagaagcttgcctcgatcggccacctggccgccggcgtcgcccatgagatcaataaccccatcagctacgtttcctccaactacaccaccctggaggagcacgtcaggcgtttgctggaggtacttgaagcctatgaagaggctcgccccgcgatccgcgacgaggcgctggcaagacgcctggagcagctcggtgagcgggtcgaactggccttcgtcaaggaggatgtcgccgtgttgctgcgcgaatccagggaaggtatagggcgggtgcgcaagatcgtccaggacctgaagaacttctcccgcgtcgacgccgaggacgactggcagtggaccgatctgcaccaggggatcgagtcgaccctcaatatcgtcgccagcgaactgaagtaccgggccgacgtggtccgcgaatacggcgatctgcccgaggtgaagtgcctgccgtcgcagatcaaccaggtggtgatgaacctggtgatgaacgcggcccaggcgatggggccggagcggggtcgcatcgtgattcgcacggggcataccgtggagcatgcctggatcgaggtggaagactcggggcagggtatctcccccgagatcctgccgcgcatcttcgatccgttcttcaccaccaagccggtaggcaaggggaccggcctggggttgtcgctctcctacggcatcgtccagaaacacggcggcaccatcgaggtacgtagccagccgggagtcggcagcgctttccggatcgtgcttcccctggaatcgcccggcaacctgggcggagcccacggaaattaactgttgcgccggctagggtaacgtaagacaatgattcatctaccgtttggggtgggtctcgggttgggatgccggtttggttcccgttgccggctcacttgaagcgagatcctgcccggatggcgaaatcggtagacgcaagggacttaaaatccctcgggggtaaccccgtgccggttcgaccccggctccgggcaccatcgtgtttcctggcgttcagccgacttctgcgttccttccccgattttcttccggcccgccatcgcgcggcagtcaacgagtcgacgttgccttctttccctcctcggccttggaggcgtttcattctagtacggctccgtatagggttcgccctggctggtgtgcgggagtgtttgtgcagcttgaagtagttgtctttggaagtttgattttttgtcgttatcttctgctcctgctttttaatttcctttccgaatatattcaattcactggcggaattatcctcttttctcctgcatgaattggtaggcggtacttcctcgttgctgtgctttgctgacagggaaggatcgcgaatcagggtttttcgcctctttcgtttatgaacaggaattcatatatcggagatcaatcatggcttggaaaggtgaggttctggctaataacgaagcagggcaggtaacgtcgattatctacaatccgggcgatgtcattaccatcgtcgccgccggttgggccagttacggacctacccagaaatgggggccgcagggcgatcgggagcatccggaccaagggctgatctgccacgatgcgttttgtggtgcgctggtcatgaagattggcaacagcggaaccattccggtcaataccgggttgttccgttgggttgcacccaataatgtccagggtgcaatcactcttatctacaacgacgtgcccggaacctatggcaataactccggctcgttcagtgtcaatattggaaaggatcagtcctgataacttgtctcggaaaaaaaagggcccgaatgggctcttttttaaatacaaataaagtgaagttgcccgtgtggccgttatgaacggacaggcagcgcttcgcagttgcgactaccaatgacaagggtatcgaactcctggggctgccgcggtcgtgggaaaccgagcgagggggggcggggaactgcttcaacacgcttcggtctgaacgggaatatcgattcctgacccgattcagaattccgtccacatagtagacagtaccgaagccgatgccctgccgactttccctggttgtatttcccgctctcttctccattgccgctggcgccgcggaggaactcaaggacatggcaggttcgaccatcgtcgttgccggaagactcgaggccgtcgaatgccctggcgcaggcctgtacgattgcacggggtggcctgccaacctgtaccgtttcgagggacaggacgtgtgcctcagcatcgaggctggctgcgattacagttgcgatggcattctcagcgagaagggcggcacgcaatcgatcctggtttccggctcctatcgcgatcacatccgcaaggtggaaggcacgcaggtttcctgcccgcgctagagacgctcggccgagtgctggaaacatcgcgaggtgcaacggatggtctgccgcccgctgaagaaggcgagcggcgcgggatgtgctagggtgcccgtttgcagggaggtcccagggcatggagcacccatacaagaccccagaggcggacctggccgaggagaagctgactgcgagaggtttcctttccggcgggcagccgctgtggaaggcattctggctgttcttcgctgcgggtttcttattgctcagcgtcgccgccaggcaggcgatggtggccattgtcgatccgctgatgcaggaagctcccggcgaacatgcggtggccctgaccttgtggggaatggtcggtgtcgagctggttaggctggcctacctgtgcctcagcctcgtcgtggtctggcgctgcgggcgcaattcccgctgggtggctgcgcgccatgccagcagggcggtgctgttggcactgatactcctgaccctttactcgatctatctggtctgggccttgctcgccagtccctgagcgacgcgctgaggctggcgagcatgctggtagggcccattccacgtgcctgcgttggctaacgccgcagccagtcctccagttgctccggcagcatcggctgggcgatcagatagccctggccctcgtggcagccccaggcctgcagcaggtggaaggtgtcgtgggtctcgatgccttccgcgaccacccgataacccaactggctggccaggccgatcaccgcctgggtgacgctctgcgccttcggcgagccggcgaggtcgcgggtgaacgattggtcgagcttgatggcggtgattggcagatcgcgcaggtaggtccagttgctgtagccggtgccgaagtcgtccaccgcgatgcccatgccaagctcccgggcacgcagcagcaccgagccgaccgccgaggcgtcgcggatgagtacgctttcggtgaattccagctcgagggcggaaaggtcgatgtcgtaggttttggcgagtctgacggcctcttccaggaagctgctgtcttccatgtccgatgccgatacgttgatcgccagcctgagcgggatgttccgtgcgttccattgcgccagctgggccatggcatggcgcagcacccagtcgctgagggggcgcatcagtgcggttttctccgccaggggcacgaattcggcggggctgacgaagccgagttgcgggtgccgccagcgcagcagcgcttccacgcccgtacacctgcctgtcggcaggtcgattttcggctgatacaccagatggaagccttcttcggttccgatcgcctgggacagcgaggtcagcaatgtgaaggcacgctgctgggcctggtccagcggcgggttgtagcgggcccagccgacaccgcggtcgcgggcgtcgtcggccgcgctgaccaccaggcgcagccagtcctgatcgccatcgaggggatcgtcggcaagcggtagtacgccgaggcccacgttggccttgatcgggatcccgcgacatacgacggggctttcgaaggcccgcagcaggcggaggcagaccgactcggtttcttcctgttgctgccgtggcaggagcagtccgaagcgcgtcgggctgatcttgtagagagtgaaatccggcagttccgcgcggatgcggtcgcgcgcctcgagcatgaggtcgttggaaaagggatagcccagcgtacggatgatggtattcagcagggcgaggggcaggaggtcggcggcgatcacggtgagggcgccgtcgcgctgcaggcgcagggaaacgtcctcctgcaggcggagacggttgtacaggccggttggctcgtcgatgtagttggtcgagcggagcgtatggatacgggccatcaccagccgggcgaagtgctcgagcatggcgacgtcccgctcggccagcggcccgcgtggttcccggtcgatgacgcagaggctgccgaggttgagaccttccgcggtggccagcggagccccggcgtagaagcggatgcgcggttcgccttgcacatagggattgtcccggaagcgcgggtcgagagtggcgtcggccacctcgaagactcccttgcccaggatcgcataggcgcagaacgaatcccgtcgcggcgtctgccggatatcgaggccgatgctcgcgcgaaaccactggcgctgatggtcgaggatggaaatgagcgcgatgggcgtctggaagtaggacgtaacggcggcgaggatttcctcgaatacctcgtccgcaccttcttccagcagaccgagttggtcgacgtaggcctgtctcgaatgctcgtcctcgggatagggtggggttgccatgctggactcctgggttactgcgatgtcgggcatcggcaatcaatgatgtcattgtgcctttatttcgtggagcgcgggctcttttcccagattgcagcgatgaaagggcatggaggttgatcgcggtcatgccggtacggccttcgacgccgacgccagctctgcgaaatcgattacctggtaaacggactcttcctatatcggccagcatcaccgctcgctaaaacggtcgcacatgcttccaccgagaaaagacatgtccgacacgctctccttcgcctcgcgcctctgcaagttcgtcatccttctcgtcatcctgctgatcggcggcgccagcctcttcctgtggtggctggggcggccttaccaggacgccatgtccgccttcgtcccgttgctcatgccgatgctcgtgctggtgctggcgttcgatacgttccgggccctcgcccgaacgaggcgctaggcgtcagcgaggcagcgctgtattcccgtcgttttaccctgccagttctggtaggcggcgggtcttctcaggcaagcgcttgaactggatgaggtttccggatttgtcctgtttccgtggcgaagccgtgcttgcctaatcccccggttcatctagatatacccatggctttctcagggttaaggagaagtcatgcaacgaatcgtcatcgtcgggggcggagtgggcggcaccatgctcgccaacctgctggtcgtccggctctacccggagatactcggcggcgaggtgcaggtactgctgatttccgactcgccggatcactactacaagccggccttcatgtacgtcgccttcgagcaattcttcctcgaagatctgaaacgaccgcagcgctcgctgctgcggccggaagtgattttccagctcgaccgggtcgaccgtttcgatttcccccgccaggaactgcagacccgcagcggcaggcgccatggctacgactacctggtgatcgccacgggttgcgtgccggctccggaacgtatcgaggggctgaaagaggctggcgaccatttctaccagtaccagccggcccgtcggttggccgagcggctggcgagcctggagtcggggcgggtattcatcacggtgagtttcccgaggacgccgaacgtgccccaccagtgcgggatcgcgcctgtggagacgaccctgatgctcgacgactacttgcgccgccggggtgtccgcgaacgtgtcgagatcgtctacacctatcccaccacggcccagttgctgcgcaactgtctgttcctgcaacgaccgacctgcgaaatcctgccgagcctgttcgagcaacgcggcatccgtttccagcgcggttttaccctggccagggtcgacccggagcggcgcatcgcctattcggaggagggcgacgagcagccgttcgacttgctcatggcgacaccgccgatccacgccgtggatgcggtcagggagtgcggcctgtcccaggccgccgccgatgaaggctggttgccgacgaaccatgaaaccttgcaggtgtatggcgtcgaccgggtgtataccctgggcgataccgtcgatctgccggtgagcaaggccggtggggcctgtcacaaccaggcgccggtagtcgccagcaacatcgctgccgagattcgtctcggcaagccctgcgcgatctacgatggacgagtccaggctgtcgcgcagatgggcctgaacgccggaatgccgctctggtacgactatcggcacgacgtaaagccgaccccgccgaccaagcttggcgggttgttgcgccagggtttcaatcgcggcctgtactgggccgtagcccgtggaatgctttgaccccgcacggggaggagccgacatggatagccatcagcagccatacgcgtcgcaggcgcaggccgataccaccctgtttcccgagcagacccgcgagagtctccaggccctggccgtcaagttgcagccgctgatcgagggccaccgcctggacaacctggtggatctgctgtcactgctttcggatatcgtcgatctgctggacccggccatggtggacaggctggcgcagctcttcgagcaggtcaccagtgtcggttggtcagtcggtaacgcggtacgcgtggccaaggcggagctgctccgagagcagccgccaagcctgaaagacctgctgcggttgttgcgcgacgccgatacccggcgcgggctggctctcgtgctgggtagtttgcgcagcctggggtgccaactcgccgcggagcaggaggttgcccatggtgcatgaccttctccgagatcgtgcggatctagaggcgcgttggaacccttccgcctacatgcagttcgcccgattgcgccagcggccggtggtcgagttgctggaccatatcgagctgtgctgtccggaacggatctacgatcttggctgcggaaccggcatcgccaccgaattgctcgcccgccgctggccgctggccgaactatacggcgtggacagctccgtggagatgctcgaggaggccgcgcgcttgccgatcaaagccagttgggaacgcgccaacctgcgccactggtgcgccgagcgccctgccagcctgctgttcgcagcggcggtactgcactttctcgaagagcacggcaagctgctgccacgcctgctggggcaactgactccgggaggctgcctggcggcgcacatgccgaactggcacgatgcttcctggtatcgcctgatgctcgatgcgctggacagtgcgggccccggtggtgcatcgctgggcagccccgcgttgcgctaccggctgcatcggcgcaatgtgctgtcgctggacaactactaccggctactggcgccgctgacggcggagctggacatctgggagaccgagtacctgcaagtggtggacggcaacgacccgatcttcgattggatcaaggtctccgccttgcgtccggtgctcggcgaactggacgaagaggcgcgtcggcgcttcctcgaccgttacctggaactgctgcaccgtcactatccacgggaactggatggacgaacgctgttcccgttccgtcgagtattcatcgtcgccagtctcggccgctgaacgggcgtttcagtgatcggagagaatgtccacggcgcccggcttgtcgtaggcgccgaagcgatcgaccagggtcgcgctggcggcgttcaggcccagcacgtcgacctgcacgccgcgctggcgaaagcccaggaccaccttgtccagtgccgcgacggcggtgacgtcccacaggtgggcgtggcgcaggtcgatgagcacatgctccagtgtctctttcaggtcgaaggcagcgacgaacctgccggacgacgcgaagaacacctgtcccctcacctggtagtggcggcgggtgccgtcggcggagcgttcgctgtcgatatcgaggtagtgcccgatcttgttggcgaagaacagcgaggccaggagaacgccggcgaccacgccgaaggccaggttgtgggtggcgaggaccacgccgaccgtcaccagcatgaccaggttggtcgatagcgggtagcgcttcaggttgcggatcgactcccagcggaaggtgccgatggacaccatgatcatcaccgccaccagggccgccatgggaatccgcccgacccagtcgctgaggaacaccaccatcagcagcagcgcgacgccggccaccagggtcgagagccggctgcgcccgccggatttaacattgatcaccgactggccgatcatcgcgcagccagccatgccgccgagcaggccggtggcgatgttcgccaggccctggcccttgcattcgcggttcttgtcgctgccggtgtcggtcatctcgtcgacgatggtggcggtcatcagcgactccagaaggccgaccaccgccagggcggcggagtagggcaggacgatcagcagggtgtcgaggttcagcggcacgtccggccagaggaacagcggcaggctgtcgggcaactgacccatgtcgccgacggtgcggatgtccaggcccaggtagatggatatgccggtgaggaccaggatgcataccagcggagagggcagcagccggccgatccgtggcaggtgcgggaagccgtagacgatcgccaggcccgcggcggtcatcgcgtagaccggccagccgacatcggtgagttcgggtagctgggccatgaagatgaggatcgccagggcattgacgaaaccggtcaccaccgagtgcgagacgaagcgcatcagcgaacccaggcgcaggtagccggcgagtatctgcagcacgccgcagagcagggtcgctgccagcaggtattgcaggccgtggtccttcaccaggttgaccatcagcagcgccatggcgccagtcgcggcggagatcattcccggacggccgccggcgaaggcgatcaccaccgccatgctgaaggaggcgtacaggccgatcttcgggtcgaccccggcgatgatggagaaggcgatggcctcggggatcagcgccagggcgacgaccaggccggcgagcaggtcgccgcggaggttggagaaccagttctgtttcagcgtctgtagcatcgggatacccaggggcgaggcacggcccgtgcagtcggtcgacagcgcgggccgcgggatggcattggaaaaaacaagggatgacgacaggcgttcaggcgaacgaacgctggccacggtcgttcggaccgtggccggaaggggcaggcatggctatggcggagtgggcagccaggtcatcggggagtagcgggtagtcgcttgcagggagcggcagcatagctgattcgacaggttcgaccaagccggcagctcgggctttccctgggtttcgtcgcgatcgacggcatggaaccaaacaagcgaaacggttctaagctatcgagggatcgtcctcgcatggagagaacatcatcatgttcaacactcgttctgtgctcgcgctggtcgtgagcctgtccctgatcggcggtacgcctgccgtcctggccgacccgggcaatggcaagggcaacccgcacggtaaccagatggacggcggaaagggtaacaagggcaacaaaggcaaccagggtggccacgacaaccatggcggccccggcaacaagggcggcggcgccggccagaagggcaacggcggtggcaactgggactcgggaccgcgtatcgacgtcggcggggtacgggtgatcctcggcgacaaccgcggctactggaacccggggccggccctgccgcccggcatccagaagaacctggcgcgcggcaagccgctgccgcccggcatcgccaagaaactcgacgaccgcctgctaggccggctgccgcactacgacggctacgagtggatgcaggccggcaccgacctgctgctggtggcggtggcgaccgggctgatctacgaggtgctggacaacgtcctcgactgatcgaaccctggctgtgcatggcggatagcgccacaacgctatccgccatgaccccccgttggagcggcggataatcgcgttgcggttgtccgccttacctcatggaagtcgttttcttaccccaggtcaggcccgcaggcgttgcagggcatcgcccagttgcgcggagaggccgtggagatcgcggctggcggcttcggtctgctccacctgttcctggttgctggaggcgatcgaggcgatttccgtgaggttgcgggaaatgtcctcggccacagcggtctgttcctcggcggcggtagcgatctggcggttcatgtcgcggatcgattcgaccgaggcggtgatctggcgcagcatggcgccggcgttggcaacctgctcggcaccggcctcgctgcgcgactgcccgctttcgatggcgcgcgcggcattcaccgcgccgttctgcacggtatcgatgatctggtggatctcggcgatggactcggcggtgcgctgcgccagggtgcggacctcgtcggcgaccaccgcgaagccacggccggcatcgccggcgcgggcggcttcgatggccgcgttgagagcgagcaggttggtctgctcggcgatgccacggatcacgtcgaggaccttgccgatcctgccgctatcgctttccaattggcggatgacctccaccgtatggtcgatctccttgcgcatctcgccgatgctgcgaatcgtttcttccatcacgtcttcgccgcgctgggcggaatcgtccgcctcgtcggcggccctggccgcgtcgccggcgtagcgcgccacttcctgggcggtggcggacatttcctgcatcgccgtggcgacctggtcggtgcggctgaactgctcgcgggtaccggccgccatcaggctggcgatcgcgttcagcgagccgctggcgctgtccaggtcgcgggtactgcgccgcagccggtcgaagatgtccaccaggaagtcgcgcagggtgttggcggccagggccagcttgccgagttcgtccttgcgccggatctcgatgcgctcgccgaagtcgccatggctgagctgggcgatgtgctcgatcaggcgttgcaccggacggaccaggttgcggttgaccagccacaggctgagcagggcgacggccaggctggcgccgatcagcaccaggctgccgagcagcatggtgcgccgggcctccgcgctgatggaggaggaatggagatcactggcctggtgcagttcgtcgcgcagggcctgcatctgcgcggtggtggcacggtcgatgccggtcaccgcctggtcgccggcgatggggtcggcgcccgcctcgaggaaccgttgcctgccttgtcggtaagccgtaccgagtcgccggtgctcttcgcgcaggcgctcgacacgatccttcaactcgccttcggccacgctgcccaggcgcccgaggatgtcctgcaccgctcgctcctgggcttcgaactggctccagtatttcgtctgggcctctgcctggcgtccgcgcagcaggacgttcttccattcctggacctggccgcggaattgcaggttggcctcgtcgatcagttgcgccgcccgcacggggccgccgagcagctcgcggtaggcgcgtacgtcgccggtcagcgagccgaagcaggccagggctatgagtagcagcgccgccaggctgccgccgagcaggacaaggatttgcgcacgtagggattgttgcagcatggaacgcctcgatggattgccaggttggaccggcacgcaggctgcgacgaggcagccgaggacgtccctgtggcccggcgaggcgggcatggcgcgtgttccggctcgcagagtatcgacagcggatctgtcaacttgaggacgacgcaggggccgggccagagccgacgaagggaaatagctggcatggatgttctgcggggcttcggttaatctctgtgacgaatgtcacattgtgccagtcgaaggatctgactcatggatgtccctcccaccgttcaggatgaacaggccgtttcccgccagttgcactcgttgagtgtgcgcaatctcgctcacctggccgctgccctgacccagctcggcttcgagctgtcgcgcagctccgaccctggcacccgccaggcggccaatgccttcatcggccagttggccaatatcaaccaggacattgatcgacagatcgagctgctcagcgcgctggacgccgacaacgtggggtttcgcctgctggacgaggtgcaatacccggatgcgcccgaatgagccgacgccaggagcacgcaaagagtggagggggtgtgcgggccgagagcggcagtctcccggcgtggcgctgatcagtcttcctggcgcaggtcgctgagcatctgctcccagtactggttggccttgcggttgagatcgaaggcggcttgacgcaactggtcgtactcggcgccgctgtagccgctttcgcgcagcttctggcgagcggcgtcggcttcttcgcgcagacggttgtaggtcgcctggtcgtccgcccaggtcctgcctgtgcgccgggtgtacttgtcctggggttcagccatgggttctccttgcgggccggatgggacttggaaaaacgctgcgctgaacagactttttccaatggcaaaaattcaaaaaaaactgacggattgcgcgacttcgctattggtaccgatgtcccatacctgtacgccagccgatgaaatttgtgcgttcctcgccaagtcggctagcttgttcaggcttgcgccttggcgctcgccgtctctccggtaagctgggaacgttgtcgccatgggctcggagactgcgcggacggcgccatggcgacaggtccgacctttccctccgatgggttttgcgagtaaggaaatgctatgagaagcaaggcgtccggcttggcgctggtggtagtggcggggcttgtggcgggttgcgccagcagtggctatcagcccgaggtcgactggccggccggctggcaggtgatcaccgagagcatcccacccgaggccagcgacgtggagcaactgggctcccggcaactggcgaccaagctcgggccgggaggcgagaaggaagccagcatcgagttgctcagcctgaagatgatggaagaggagtcggtggagatcgacggccagttccagagtgtcttcgatgtcgtccaatcgggctaccgcaaggccgggctgggctcgcgctgcaccacaccgatccgctcgaacctcggcggcctggcatcgctggagacccactgccggatcagccagggcaacgaggtgctgctgacccagatcgtggcgatggccctgggacagcgcgcgatgtactccctagtatataccgccagtccggccaacagcgtggtctaccggcagagctacctgcgcacccgggccagcctggtcctgcgctgaagggccagccgctcgacgcctggacgcgaccggcgtcgctcaggcttcctcgggcggcgcctcgacgctgagatagcgatgggcgccgcaacgccggcaacgttggcgcagcatcaggtcggggcctaccgtgaccaggctaccttcgtcccagcggcaacctcgcaagaaacaacgcaagcgcatgactcctccccgcggggcggctcgccccgtccacgaaacaggcagtggtggtgtggttcactccggcttgttcttgtctggaggtgggaaaagcctgcggcgaagcgtctagaatgggcaacctaaattcgccggttcattccgcggcgggattcatcacccaactggcggcggtgacctgcggtgccaggcacagctcgccgaccatctgttccaccagcgaatcctccttgtgcagggtgaacaccacggcgttcacttccacgttgccgctgcctttcagcgcgtggctttccaggctctgcaggttcaggcggttgtcgcccatgcgttgcagcaactgcatgcgcaccagcgcttcgttgcgcgcctcgcaggacacgctgatctggtagaagcgctcctgctcggcctcgcccgaggtgtggcggtccaccacccggccgagagcgggcaggaacaggttggcgatgacgatcagcgcggtcgtcatgcaggccgccaggatgaaaccgctgccggccagtacgccgatcgcgccggtgctccagatgctcgccgcagtgctcaggccgcgtacgctgaggccgtcgcgcatgatcacgccggcgccgagaaaaccgatgccgctgactacctgggccgccatgcgggtcacgctgacctcgttgtcgagcaacagcggcaggatcgagaagctggccgcaccgagtgcgaccatcgcgtgggtggccatgccggaagagcgctgtcgccattgtcgctcgagaccgaccagcgcaccgaggccgagggccgtcaccaggccgatggcgatttccggggtcatgctgtgctcctgtgaaaaaaccgcccattctacgccgttccgttgggccgcgccggggccgacggccctgggcggataagtctcttgcgtttacctttacgttaacgtaaacatgctcttcgacttcaccgacaccgctcgccggtgtccgtcgtagcgccctggcggcgcaggacgacggttcagcgacattcccagaacaaccacaacaagggaaagccatgaatcagccgagctatacctcgggtcgccaggatgtcgccttgctggcgaccaccgtcggcgacgccttcgatgccaccgtcgcgcgtcatgccgagcgcgaggcgctggtggtgcggcatcaacgcctgcgctacagctggcggcaactggcggagcgggtcgatgcctacgcccgcgccttcatcgcgctgggcctgcgccccggcgaacgcctggggatctgggcgccgaactgcgccgaatggtgcattacccagttcgccagcgccaaggtcggtgcggtcttggtgaacatcaacccggcataccgcagcagcgagctggaatacgctctcaagcagtccggttgcagttggctgatctgcgccgacgccttcaagaccagcgactaccacgcgatgctcggcgacctgctgccggagctggcgcgggcgcgtccgggcgaactggccagcgagcgcctgccggaactgcgcggcgtgatcagcctggccgagcgggcgccggcgggcttcctgcactggcagggcctgccggggctggccgccgcggtaggcgccgaggaactgcgccagcgccaggcctcgctgcagttcgacgagccgatcaacatccagtacacctccggtaccaccggcttccccaagggcgccaccctcagccactacaacatcctcaacaacggctacatggtcggcgaaagcctcggactcggcgcggaagaccgcctggtgatcccggtgccgctgtatcactgcttcggcatggtgatgggcaacctcggctgcgtcacccacggctcgaccatgatctacccggcgcccagcttcgacgccgaggcgaccctgctggccgtggccgaggagcgcgccaccgcgctgtacggggtaccgaccatgttcatcgccgagctggatcatccgcgccgccgcgaattcgacctttccagcctgcgcaccggaatcatggccggcgccacctgcccgatcgaggtgatgcggcgggtcattggcgacatgcacatggccgaggtgcagatcgcctacggcatgaccgagaccagtccggtgtcgctgcagaccggtccggacgatggcctggagctgcgcgtgaccactgtcggacgcacccagccgaggctggagagcaagatcgtcgaccagacgggcagggtggtgccgcgcggcgagatcggcgagctgtgcacccgcggctacagcgtgatgctcggctactggaacgacccccaggccaccgccgaggccatcgacccggcgcgctggatgcacaccggcgacctggcggtgatggacgacgacggctacgtgcggatcgtcgggcgcagcaaggacatgatcatccgcggcggcgagaacatctatccgcgcgaactggaggagttcttcttcactcacccggcggtggccgacgtgcaggtgatcggcatcccccacgagcgctatggcgaggaaatcgtcgcctggatcaagctgcatccgggccaccacgccgatgacgaacagttgcgggcgttctgcaaggcgcgtatcgctcacttcaagatcccgcgccacttcaagttcgtcgacgagttcccgatgaccgttaccggcaagatccagaagttccgcatgcgcgagatcagcatcgaagagattcgcctgctcgcgctgcgccaggggcgcgattgagaggatggagccgcgccccgctcctgcgctaaggtggcgggcggcgcgcagcgaggcgagaggggcgggtgaagaacgacggcgagactcaggtgagcaccaagggcaccatctcggtgcgcctggtcggcgaggcgctggtggagtggcgccggcagggcggcgaggagggggaggtcctccaggccgccggtatcgatccgcagctgctcggcaaaccctacgcgcgggtcacctcgcacgcctattcgcggctctggctggatctcgctcggcgcatggacgacgagttcttcggcatggactcgcggcgcctgaagagtggcagcttcgctttcatgagccgctgcgcgatccacgagcagaccctggagccggcgctgaccggcatcctgcgattcctctgcctgcagttcgacgacttccagccgcgcctgcagcgccgcggcggcctggcggaaatcgtcctcgacgaggcgccgggccggtacgggcgagcgctgtcctacttcaccctatggatgatcacccatggcctggcctgctggctggtcggccggcgcatcccgatcctggccatcgacctgcgctgtccgcagccggactacatcgaggactaccgggtgatgttcagcgacaacctgcgtttctcccgtcccctcagccgcctgctgttcaatgccgactgcctggccttgccggtccgccgcgacaagcgggagctgcggcgcttcctgctcggcgcgccggccaacatcctggtccgctatcgcgatccgcagagcctggcggcgcggatcaaggcctacctgcgcagcctgcggccgggacgctggccggacgcggacgcgctcgccgggcatttcttcatggcgccctcgaccctgcgccgcaagctgtccctggaagggcagagctaccaggcgctgaaggaccaggtccgccgcgacctggccatcgcgcggctggacgccggcgcggcgaatttcgccgaactggcgctggagctgggcttcgccgatggcagcgcgttccacaaggcgttcaagaagtggaccggctcgacccccgggcagtaccggacgcaggtcgcggcggaaaccgcgtcggccgagtcgtcaggcgtcttgtccgaaacgctcggccatcgatagggtgaatgcccgcgcagcgtcatccgccgtatgtcgcgaacggttcggcggggcaggcggccagcacggattgtccaaaccgctcaggcagattgaagcctttcgacattgccccgcgtcggccatggcgtgaagattccggctactccatacaaaaacaagccgaggagtcctgcaatgcgcgactacgccaccactgccgccgggttcgacttgcagcggaccgccgccgccacgctttccggtacgctccaggcgctcaacgcctgcgtcgaatgctgcgaccggcatgccctgccgggacggatcgcgttgttctgggagggcaaggatggcagtcgcgccagctataccttcagcgagctgaaagcgctctccggacgtttcgccaatttcctccaggcccagggcgtacgcccgggcgactgcgtcgccggcctgttgccgcgcacgcccgagcttctggtcaccatcctcggcgcctggcgcctgggcgcggtgtaccagccgctgttcaccgccttcggcccgaaggccatcgaacaccgcgtggcgaccgccggcagcaaggtgctggtcaccgatgcggccaaccgcgacaagctcgacgaactcgccgatccgcctctggccgtcaccgtcggcggaccgaaggggcagggcatccgtcgcggcgatttcagcttctgggccgagctggagcgctatccggtcgaattcgaaccggttccgcgcagcggcgaggatccgttcctgatgatgttcacctccggcaccaccggcctggccaaaccggtgccggtgccgctcaaggcgatcctcgccttcgtcggctacctgcgcgaggcggtggacctgcgccccgaggacgccttctggaacctcgccgatccgggctgggcctacggcctctactacgctgtcgccggtcccctcgccatgggccatccgaccaccttctacgaagggccgttcagcgtggaaagcacctgccggatcatccgtgactacggcatcaccaaccttgccggatcgcccaccgcctatcgcctgctgatggccgccggcgcggccgcggaaactgcgctgaaggggcgcctgcgcgcggtcagcagcgccggcgagccgttgaccccggaggtgatccgctggttcgccgacaggctcggcaccaccatccacgatcattacgggcagaccgagctgggcatggtgctgtgcaaccaccatgccctggcgcatccggtgcgggtcggcgccgccggattcgcctgtcccgggcaccgggtagtagtgctggatgacgatctcaacgaactgccgcccggccagccaggcatcctcgccctcgaccggcggcgttcgccgctgatgtggtttcccggctaccagggcctggaaaccgcagccttcgtcggcgactactacctgagcggcgataccgtcgaactcaacgaagacggcagcatcagcttcgtcggccgcgccgacgacgtcattaccacctctggctaccgggtcggcccgttcgatgtggagagcgcgctgatcgaacacccggcagtgatggaggcggcggtgatcggcaagcccgacccggagcgcaccgaactggtcaaggccttcgtcgtgctctgcgccggccaccggccgacgccggaactggcggacgcattgcagcgatacgtgcgccagcgcctgtcggcgcacgcctacccgcgggagatcgagttcctcgaggaactgccgaagactcccagcggcaagatccagcgctttctcctgcgcaaccaggagatcgcccggcaacgcgaggcggccccacgggcggccgccgcgaactgattcagcaggagaaaacgacgtgcgtatcgaaaatcgagtgttcctggttaccggcggcagctccggcctcggcgccgccaccgcgaagatgctggtggagcagggtggcaaggtggtgctggccgacatcaacgccgaggccggcgcggccaaggccgccgagcttggcgcccaggcgcgcttcgtcagggccgacatcgccagcgaggccgacggccgccaggccgtggccgctgcactggaggccttcggcggcctccatggcctggccaattgcgcgggcgtggcgccggccgagaaggtcctcggacgcaatggcatccatgccctggagagtttccgccgggtcatcgacatcaacctggtgggcagtttcaacatgctgcgcctggccgccgaggccatgtcccagggccagccggacgagggcggcgagcgcggggtgatcgtcaataccgcctcggtggcggcgttcgacgggcagatcggccaggccgcctattccgcctcgaagagcggggtggtcggcatgaccctgcccatcgcccgcgagctggcgcgcttcggcatccgggtgatgaccatcgccccgggcatcttcgagacaccgatgatggccggcatgccccaggaggtgcgcgactccctcggcgccagcgtgccgttcccgccgcgcctggggcgtccggacgaatacgccgcgctggtccggcagatcatcgagaacagcatgctcaacggcgaagtgattcgcctcgacggcgccatccgcatggccgcccgctaatacaggaggaagatcccatgacccgcgaagatccgatcgtcatcgtcagcgccgtccgcaccccgatgggcggcttcctcggcgacttcaaggacgtcaacgccgctaccctcggtgccgcggcggtgcgcgccgcggtggagcgggcgcgcctgcaagccgacgaagtggacgaggccgtgctcggctgcgtgctcgccgccggccagggccaggcgccggcgcgccaggcggtgcttggcgccggactggcgcgcggcacgccgtgctcgacgctgaacaagatgtgcggctcgggcatgaaggcgctgatgctcgcccatgacacgttgctcgccggcagcgccggggtcgcgctggccgggggcatggaaagcatgtccaacgcgccctacctgctggagcgcgcccgtagcggctaccgcatgggccacggcaaggtgctcgaccacatgttcctcgacggcctcgaagacgcctacgacaagggccgcctgatgggcaccttcgccgaggactgtgccgaggcctacggcttcacccgcgaagcacaggacgagttcgccgtggcctcgctgacccgcgcgcagcaagccatgcgcgacgggcgcttccaggccgagatcgtgccgctgacggtcaccgccggcaagaccgagcgcctggtggatagcgacgagcagccgccgaaggcccggctggacaagatcccgaccctgaagccggcgttccgcgaaggcggcacggtgaccgcggccaactccagttcgatttccgacggcgccgccgcgctggtcctgatgcgcctttccgaggccgagcgacgcgggctcgcgccgttggcggcgattcgtgggcatgcttcgttcgccgacgcgccgaacctgttccccaccgcgccggtcggtgcggtgaagcgcctgatgcagcgtaccggctggtcgctgggcgaggtcgacctgttcgaggtcaacgaagccttcgccgtggtcggcatggcggcaatgcgcgacctcgacctgtcccacgagcgcctcaacgtccacggcggcgcctgtgcgctgggccatccgatcggcgcgtccggcgcgcggatcgtcgtgaccctgctcaacgccctgcagcagtacgacctggaacgcggcgtggcggcggtctgcatcggcggcggcgaggcgaccgcgatcgccgtcgagcgcttgcgctgatgcaggcagtgaagaagaggaacccgcgatgattccctgcgaagaagagatccagatccgtgacatggcgcggcagttcgcccaggaacggctgaaaccgttcgccgccgactgggaccgcgagcaccgtttcccggccgaggcgatccgcgagatggccgacctcggcttcctcggcatgctggtgcccgaggaatggggcggcgcgcagaccgggcacctggcctacgccatggccctcgaggagatcgccgctggcgacggcgcctgctcgaccatcatgagcgtgcacaactcggtcggctgcatgccgatccacaagttcggcagcgccgagcagaaggagcgcttcctccgtccgctggcccagggttcgatgctcggcgccttcgccctgaccgagccgcaggccggttccgacgcgagcttcctgaagacccgcgcccgccgcgacggtgaccactacgtgctgaacggtgccaagcagttcatcacttcgggcagccacgcggggatggtgatcgtcttcgcggtcaccgatccggatgccggaaagcgcggcatcagcgcgttcatcgtgcccaccgacacgcccggctacgaggtggtgcggatcgaggacaagctcggccagcacgcctcggacacctgccagctggccttcaacgacctgcgtatcccggccacgctgcgcctgggggaggagggcgagggctaccgcatcgccctggccaacctcgaaggcggccgcatcggcatcgccgcccaggcggtcggcatggcgcgcgcggcgttcgaggcggcgcgcgactacgcccatgagcgggaaaccttcggcaagccgatcatcgagcaccaggcggtggccttccgcctggccgacatggccacccgcatcgccgtggcgcggcagatggtccaccacgccgccagcctgcgcgaagccggcctgccgtgcctgaccgaagcctcgatggccaagctgttcgcctcggagatggccgaggaagtctgctccgcggcgatccagaccctcggtggctatggctacctcaaggacttcccggtggaacgcatctatcgggacgtgcgggtctgccagatctacgagggcaccagcgacgtgcagcgcctggtgatcgcgcgcagcctgtagcggcgactatccgtcgtttccgcaacggcgccttctcccttcagggagagggcgcactgaggcacctcggaagcaaatgcccgagcctcgttcgccctacgccccttggcaggcgctcacgccggctgcgccgccttgttctcgcgcgcggtgacctgctggcacagctcgatgatctgctcgcgcatccagcggttggccgggtcctgatcggtgctctcgtgccagtacaggtgggtttccagcttcggcacgtcgctcaccggcagcaccgcgtagtgcaggtcgtggtgacgggcgaagcgttccggcacggtcatcgccatgtcggtctgctggaccaccgtggaggccatcaggtagtgctgcgagcgcagcgcgatcttgcgctggatgcccatcttgcccagcgccaggtcgatgtagccgaggccgctgcggcggctggaaatatggatgtgggtcaggcccaggtaatcgtccagggccagcttcggcttgcccgccagtgggtggccgcggcgcatggcgcagacgtagcggtcctccatcagcttgacgtggcgcacctggggatcggtgttcagcggcgcgtcgacggcgaagtcgaggcggccggcggcgagttccttggtggtttcgcggcgcttggcgaggaagctctcgatatgcacgttcggcgccaggcggcgcaagcgctggaacagcggggggaggatgaccgcttcggtgaggtcggtcatgctgatgcggtaggtcttgttcgcctgctgcggatcgaagctgcggctctcctgcaccgaaacccgcagcaactgcagcgcgttgcgcaccgggccgatgatgttctgcgccatcggggtcggcaccatgccctgggcggtgcgcacgaacagcgggtcgttgaaggtctcgcgcaggcgggaaagggcgttggatacggctggctgggtgatgccgacgatctgcccggcgcgggtcaggttggcttcggtatagatcgcatcgaacacgatgaacaggttcaggtcgactttgttcaggttcatggcactggctccgcgacttttcttgttattgggggcttggatgacccccatatggatcatgaatgttcatggacggaaaaaatagactgggcaaatcttaagccctgttccggcatcgttaccagcgcctttgtccgatgcctcgcctgccaacccgtcagaaggtatcccccatggatttcgcctattcccccaaggtccaggagctgcgtgaacgcgtcagcgcgttcatggaagcgcatgtctatcccgccgaggccgtgttcgagcgccaggtcgccgagggcgaccgctggcagccgacggcgatcatggaagagctgaaggccaaggccaaggccgaagggctgtggaacctgttcctgcccgagtccgagtacggtgccgggctggccaaccacgaatacgcgccgctggcggaaatcatgggccgttcgctgatcgggccggaacccttcaactgcgccgcgccggataccggcaacatggaggtgctggtgcgctacggcagcgaggagcagaagcgcacctggctggaaccgctgctgagcggcgagatccgctcggccttcgccatgaccgaaccgggcgtggcctcgtccgacgccaccaatatggaggcgcgcgccgagcgccagggcgacgactgggtgatcaacgggcgcaagtggtggacttccggcgcctgcgatccgcgctgcaagatcctgatcttcatgggcctgaccaacccggacgcgccgcgccaccagcagcactcgatgatcctggtaccggtcgacacccccggggtgaagatcctccgtccgctgccggtgttcggctacgacgacgcgccgcatggccatgccgaagtgctgttcgagaacgtgcgggtgccctacgagaacgtcatcctcggcgagggccgcggtttcgagatcgcccaggggcgcctcggcccgggccgcatccaccactgcatgcgctccatcggcatggccgagcgcgccctcgaactgatgtgcaagcgcgcggtcagccgtaccgcgttcggcaagccgctggcgcgcctgggcggcaacatcgaccacatcgccgactcgcggatggagatcaacatggcacgcctgctgaccctgcaggccgcctacatgatggataccgtgggcaacaagatcgcccagagcgaaatcgcccagatcaaggtggtggcgcccaacgtggcgttgaaggtgatcgaccgggcgatccagatgcacggtggcgccggggtttccaacgacttcccgctggcctactggtacgccatgcagcgcaccctgcgcctggccgacggtccggacgaggtgcaccgcgcggcgatcggcaagttcgagctgggcaagtacgtgcccagggagatgctgcgcagcagccgctgacggctgtggtataggggaaaggcccgcgggtgcgggcctttttcattccggggagtctgcccctttttcctcggcgttgcgttccagctgccacgcgcgacggctgtgcagcagggcggcgaactcgcgggccgcccgctcgttgcggaagcagatcccacgcgtgccgaggcggacccgccagaaaggttcagcgtgggtgtccagacgttcgatccagagcgtgttcggcattcggttcggccttgtcctcgacggtggctttcggcgtgcgggtcttcagcagggagagcaggataccgcccgccagcaggccgaaggttacgccaagcgagaggccggcgggaatcttgccgatcacaccgtggagcatgatcttcgcaccgatgaacaccagaaccagggccagggcgtatttcaggtagacgaagcggtggatcatcgccgccagcgagaagtacagggcgcgcaggccgaggatggcgaagatgttcgaggtgtagacgatgaacgggtcctgggtgatggcgaagatcgccggcacgctgtccaccgcgaacaccaggtcggccagctcgatcagcaccagggcgaagaacagcggggtggcgtagcgcaccagcttgccgctggcgtccggcaggcggacgaagaagtgatgctcgtgcagttccttggtcacccgcatgtgcttgcgcaggaagcgcagcaccgggttgtgctccaggtcgggttcttcctcgtgcttgttgaacagcatcttcacgccgctgaacagcaggaaggcgccgaacacgtacatgatccagtcgaattccttcaccagcgcggcgcccaggccgatcatgatggcccgcaggacgatggcgccgaggatgccccagaacagcacctggtgctggtagcggcgggggatgccgaagaaactgaagatcatcgccatgacgaacacgttgtccatcgatagcgactgttcgaccaggaagccggtgtagtactccaccgcgctggtggggccgaaggcgtaccagacccagccgccgaaggccaggccgcaggcgaagtagccggcggacagcagcaggctttcgcgcacgccgatttcgtggtggtcgcgttgcagcacgccgaggtcgaggaccaggagaacgatgacgatggccaggaaggccagccagaaccagatagccgtaccgaggaacggttcggtgagaaatgcatgcagagctgccattgggccccctcgcttcgaattgtcggatggtcatgtgactccgacatggcggcaattgcttaccgtcagaggggcccgcagtcactcggaaaaaataaaccaggctccgggcgccggcaaaacggcgaggttacaaagtgctacagcgttcagtagacccagacttccacccgccggttcttctgtcggcccagttcctggtcgttgctggcgaccggcaactcgtcgccgaagccggcgatctcgcggaaactcacgccgccgcgggccagttcgcggcgcacggccatggcgcgcagacgcgaaagcaggaccgaacgctcggcgtcggacttgggatcgccgaagcccaccagcacggtgcgctcctgcaacttccgattttgccgcaggtagtccagcaaacgctgtacgtcgagcagtgccttgttgtcgagcagcgcgctgccttcctggaagcggaagttcaccgtcaggcgccgcgcctgttccgcgagcttgcggtattcggcgggcatctgcgggcgcggtgcgatctgcaccgcctggatcttctgcgcgacgaagccgctgcgggtgacgatcgcctggccgcgcgggccctgggcgaaacgtaccagggcctgggcccaggggttcttctcgccgggcttcaggtagaggaacaggcggcgcgacagcgggtagtcctcggtggcgatcaggctttcctggggcgccatcggcagcgattcgccgtcggcgatggccaaggcgcgggcccggcccaccgacgcgatgccgacgaagccgatggcgtgcggatcggcgctcaccgcggccgccagccgatcgttggattcgaagcggcgggcgtcgctggccaggctcttgccgtgactggccagcaccagttccttgaaggtgtcgtaggtgccggactgctcgtcgcgagcgtacaggcggatggcgccgcccttgctgcccagttcttcccaggtacgcacctcgccggcgaacactgccgccagttgcgcggtgtccagcgaggccagcgggttgtccggatgcaggatgatcgccagtccgtcgatggcgatcacctgctcggcatatgggctgcgcaggtcgccgaagccggccagggcgcgaacttcgctgtccttgacggggcgcgaggccgcggcgagttcggcgtggcgttcgaggagggcggcgaagccggtgctcgaaccgtgggcggatagctccaccctcaccaggcggccgtcgcggctcttgccgagcagatggagttcgttttcccgttctccgggggtacggcggatatcctccaggccttcctcttccatcaggccctcgaccagggccggcaggagcttcgcgccgatggtgttggaaccctggatgcgcagcgccggcgtgtcgtccgtggggatcggcaagggggcggcgaataccgaccaggggaaggcgtaacagaggaatccgaggaaaaccaggctcagggtacggctccagaggtctttgtcactggcgcgctggcggtgtggcatcgcgggcatcgtcttctatggggaagggaatttgccggcgagattaagtcagacgggtgacgctaaggttacagcgttggggaatcatggccctgcgccattgtctcggtcaggaagtcgagaaacacccgggtcttgccggccagttggcgcgatggatagaccgcgtggatcgccgtctcgtcggccttccagccggccagcaattcaaccaggcggccttcggccagttccgcctgtacgtacagccgtgggatcagactcaagccgaagccggcgagcagggcatcgcgcaccgccaggctggaggacacccggtaacgcccggcgataggcaccgctatgcactcgcggcccttgcggaaggtccagcggtcggcatggccagagaggctgaagcggatgcactcgtgttcgcgcagggcctccggccgcagcggctggccatgctgaccgaggtaggccggcgccgcgcagagcacgtgctccaggaccagcagcgggcgggcgaccaggccggagtccgcaacccggtcgctaccacgcagggccaggtcgatgccttcggcgatcaggtcctggcgaccgtcctgcaggagcagttccaggcgcaggtccggataacgctggagaaaagccggaatggccggggtcaggcaggtgagggcgagggtcagcggggcgctgacccgcagcaggccgctggggccctgctgcatcgaagtgagcgcggcgtcggcggcctcgaggtcgtcgaggatgcgctccaggcgctgccggtagacttcgccggcctcggtcaggctcatgctgcgggtggtgcgattgatcaggcgcaccttgaggtgcgcttccagctcggcgacgttcttgctcacggcggccggcgagagattcatctgccgggccgcggcggcgaagccgccattcgcggccacggcgcggaagaccttgagggcggtgaggtgatccacggggataattcactgtcagtaatcaatgaatcagggattaaagcattatcaacccggggtgtgctggctaaagtctcgtcatagtccacggttctagaggtgaatgaccatgcaacccttcgtcgtcgaacgtctcgatcacatcgtcctgcgggtccgcgacctggaacgcagcatcgcgttctatcgcgatgtcctcggttgcgtggtggtgaagtggcgcgacgacctggagctggcccatctacgcctgggcacgtcgatgctcgacctggtcgcggtgtccgggtcgctcggccgggagggcggtgcggcgccgggtggggaagggcgcaacgtcgaccatttctgcgtgcgcatcgagccgttcgacgaggccgcgctgatcgcccatctcgaggggttcggcctggtcccgcaggttcccgcggaaatccgcttcggtgccgagggcgacggctggtcgctgtacttcttcgatccggacggcaatcgagtggagctgaaggggccgtgggtggacaatcctgcctgagggaaaggtcgcgcgccggataggcgggtggcgtcggcgagatcgcccgggccaggcagcgacctcctgaaggctcatccggggatgagccttcactttgggctgcgcctcaggccagttccagccagatcggggcgtgatcggagggtttctccatgccgcgcaggtcgtagtcgatgccggcgtccttgaagcgcgactgcagcacccggctggccaggatcacatcgatgcgcaggccgcgcttgggggtgtcctcgaagccacggctgcggtaatcgaaccagctgaagcggtcgttcacctccggattcagggcccggaagctgtcgaccaggccccagttcttcaaggtagccagccattcgcgctcttccggcaggaagctgcacttgccggtcttcagccagcgcttgcggttttcctcgccgatgccgatgtcgcagtcttccggcgagatattgatgtcgcccatcaccaccagggcctgctcgggcttgaagctgttctccagcagcgactggagatcggcgtagaagcgctgcttggccgggaacttggtcggatgctcgcggttctcgccttgcgggaagtaaccgttcatcacggtgatcgggttgccctgggcgtcgctgaaggtgccccagatgaagcgccgctgggactcctcgccgtcgctcgggaagccgcggtgcagttccaggggcgcctggcgggagagcagggcgacgccgtagtggcctttctgcccgtggtagtggacgtggtagccgagcgcctcgatctcggcctggggaaactggtcgtcggcgaccttggtttcctgcagcccgatcacgtcgggctggtgccgctcgatcagcgccgccagttggtgcggccgggcgcgcagaccgttgatattgaaagagacgattttcatggtgggcgtcctggcaaaaacaggaatgctagcccagccgggggatgcctggcgaccctggaggcgctgtgctagtgtccgccgggtacccgatggctgtgtggcttggcgctttgccggccctgtggtctgccgcggacggggatggccaggccatccgctcgaccaatcgccgtggcgaagcgtgcgtgtcgctgcgccggcggccgacaaggaatgcgttccatgcctgatcaggtcaccgatgtccgtctgctcgacgacggctatagccgcgaagtccgctcgcttttctaccacgcctaccgccacgaaccgaccttcgcctacctgatggatgcgcagcgcgccggctacgaccagcgcgtgcgtgcgtccgtccgggagatggtcgagcgccatctgggcgaagagttgccggccatcggcctgttcatcgacgatcggctggtcgcggcggccctgatcacgccgccgcagcggcgcctggatatcaccgagagctggagctggcgcctgcgcatgctgttcagcgtcggcctggccgcgacccggcgctacctggattaccaccgggcagtgcaggcctgcctgccggtcggcccccatcaccagttgccgatgctcggcgtgcatcccgagtaccagggcaggcagatcggcgagcagttgctggcggccgtgcagcgctggtgcgccgaggactccgcttcgcaggggctggtcctggatactggcaatgcgcgctacctggacttctaccagcggcacggctaccgcgagatcggcgaggtgacgctgggagcggtgcgcgagcacgtcctcctgcatcctggcgagacgccggcggcgacctgagcgttcccccggacgcgcgagaaaagccatgcctgtcaggcgcttggcgtcataaaacccgaatgtcaggaggtggtcggcggcgtccgcgcaaatctggacgcgcgccacccgcctgcgtagcatccgcgccatgagactgactcaaggattgttccggttcccgctggccgggctgctgtgcctgagtacggccgccttcgcggagagccagcttagcgtgcgcgtcacccccgccaatgccgccctgaaggccaatatcgaggcctatgtgggtagcctcggcgagcgggacgaagcggcgttgcaacgtttccgccgcaatgccgaagcgcaggcggaaaaggcggcccaggcgctcggctacttccaggcgcagatcgacagcgaggtgaaggacggcaagccgccgaagctcacgctcaaggtagtgcccggcgagcccgtgcgcctgcgccaggtgaatatccaggtgctcggcgaggccgccagcctggagagcttccgcttgccgtcgggcaagcaactgaaaccgggcgcgaagctgaaccagggtgtctacgaggatgccaagcggctgatccagaaccaggcctcgcgctacggcttcttccagggccgcttcagcacccagcgcctgagcatcgatccgcgcgccggcatcgccgacatcgacctggtctacgacagcggccagcgctacaccttcggcaaggtgagcttcgacggcgactcgatcatcgaggaagaactgttgcgccgcatggtgccgttcaaggccggccaaccctatgactccgaactgatcgccgaactcaaccagaacctgcaatccagcggctacttcgagggcgtgcgggtcgacgccgcgccgacccaggcgcaggccgacggcgcgcgccaggcgatcccggtagcggtccggctggaggcgcgcaagcctcggaccatgggcgtcggcctcggtttctcgaccgacgtcggggcgcgcgcgaggttcaactggacccgccattgggtgaatgccgaagggcatagcctgggattcgagtcggaaatctccgcaccacggcagaacgtcggcgcctggtacgagattcccctcgatccgccgctcaccgacaagctgcgcttcaccagcggctaccagttcgaagacctggtcgacaccgagagcaagctgctgacccttggcggcgaatggcacagcaagcagcccgatggctggcagcgggtggtttcgctgaactggatgcgcgaggagtacaagctgggcgacgactccgggctgagcagcttcctgatgccggggatcggctactcgctgctggagaccgacaacaaggtcgaccccagccatggctaccgcctgcagttcaacgtcaagggggcgaaggaaggcctgctggccgacgccgacgtactccatgtcgacgccatggccaagggcctgaccagcttcgccggcggccatcgcctgctcggccgcctgcaggtaggcggaatcgccaccaacgactacaagtcgatcccgccctcgctgcgcttcttcgctggcggcgaccagagcgtgcgtggctacgactaccggacgctgtcgccggagaattccgatggcgacaagatcggcggccgctacatgatcgccggcagcgtcgagtatcaatatccgctggccgagcgctggcgcctggcgaccttcgtcgaccagggcaacgccttcaactcgctggacttcccgtcgatcaagaccggggtcggcttcggcgtgcgctgggtctcgccggtcggcccgttgcgcctcgacctggcccatgcgctcgacgacgacggcggtttccgcctgcacttctccatggggccagaactgtgaaggcgctgaagatcaccttgctggccatagtcgggctgctcctcgcgctgctcctgggactcgctgcgctgctcggcacccagaccggcagcgcctggctgctcggccgcgtgccgggcctgcaggtcagcggcttcgagggtcgcctcggtggcgcctggcaggcacagcggctgtcctgggcgcaggacggtacgcaactggtcgtcgagcggcctgaactgcgctggtcgccggcctgcctggcggggctgcgcctgtgcctgcagcgggtggccgccgaacgggtcgcgctggacctgccgccgagcggcgacagcgccgacagcgggccgatcagcctgccgacgctgaaactgccgctgagcatcgaactcggcgaagtggcggtcggcagcttcctgctcgacggcaaccagcaggtcgccgaactcaagctggcggcccattggctggccgatggcctgcacatcgactcgctgacggcgcggggcttcggcttggacctggcgctccaggggcgcttgcagccgagcggcgactggcccttgcaggccgaagccacgctcggcctgcccgctcccgaaggcaagccgtggaagctggccgtccaggtcggcggtgagctgcagcaggcgctgaccctgaaaggccgcagcagcggttacctggacggcagcctggaaggacagttgcaggcgctggcggaaaacctgccggcacgattgctgatccgcgccgacggtttcaagggggcggccggactaccggacaccttgaccctgaatgccatccagctcgatgccggcggcgatctcaagaacggttacctgatccgcggcggcgccagcctgccgggcgagggtggggcggtggcgttgagcctggacgggcgggtcgacgcccggggcgcggatatccgccaactgcgcctggacgctggcggcgagcagcgcctggagctggtcggacgcctggactggcgcgaaagcctggccgccgacgcgaccctggactggaaggatttcccctggctgcgcctgtatccgctggcggagccgccgccggtgacgctgaagaccttcaaggcggaagtgcattaccaggaccagcgctacctgggcaatttcagcgcggcggcgagcggtccggcgggcgacttcacgctggccagcccggtgtccggcgacctcgtccagctcaacctgccgtcgctgcagctccgtgccgggcaaggccaggccgagggccgggtgacgttgcgtttcgacaatggcgtggcttgggataccgccctgcagctcagcgaactgaacccggcatactggatcgccgagctgccgggttcactggccggtcccttgcgtagccagggaagtgttcgcgacgagcggctggcgttgggcgtggatctcgacgtcaagggccgcctgcgcggccagccggcgctattccaggcgcgcgccgaaggcgaggggcagcgctggacgctgggcaacctcgacctgcgcctgggggataacaaggttcagggcagcggggcgctcgaccagcgcctgcaaggccgcctggacatcgccctgaaccgtctcggccagctttggccgcaactcttcggtcgcctcgacggacgcctcgacctggctggcagcctcgcggcgccgcaaggcaggctgaacctcaagggacagcagatcgcctacgccgagcagcgcatcgccggcctcgacctgcaggcgaacctcgatgcccggcagaacggcaccctggcgctggtcgcgtccggcctgcgcagcggcgaaaccgatctcggcctgttcaaggccaatgcccgcggcgaccaacgccgccagcaactggaactggacctgcaaggtgccttgctcaagctcggcctggccttcgacgggcaactggagcgcggcaactggcgcggtcgcctggcgcgcggcgagttgagcagtggcggccaggactggaagctacagcagccggcgcgcctggagcggttggccgacggcagggtcaatttcggcgcacattgctgggtatccggcgccgccagcctctgcggcggcgagcagcgcctgctgcccgagccgcggctgcgctacaccctgcgcgacttcccgctggacagcctgaagcaatggttccccgaggacttcgcctggcagggcaagctgaacggcgacctgcaactggacgttccggcccgcggcccgagcggcgtggtcagcctggacgccggcagcggtacgctgcgcctgcgcgaccagggccagtgggtcgacgtcggctacgacagcctgcgcctggagagccggttggcgcccaaccgcgtcgatacctccctcgacttccgcggaccgaagctcggcgagttgcgggtgcaggcgcagatcgacccgcgcccggcgagcaagccgctgagcggcgagttcagcctggccggcctcgacctgtcggtggcgcgcccgttcgtgccgatggtggagaaactgcaaggcaggctgaacggcagcggccggctgtccggcggcctgctggcgccgcgggtcgacggacgggtgacgctgagcgacggcaacatcggcggcggcgagctgccgaccagcttcgagaacctttccctcgacgctcgcatcgctggcgaaagcctggaactcggcggcggctggcgcagcggcaggtacggccagggcagcctgtccggcaacctgagctggggcgaggcgctgaacgtcgccctgaacatccgtggcaaccgcctgccggtggtggtcgatccctatgcgcaactggaggtggaaccggacctgaagatcggcatggccggccaggagctggcgatctccggcaaggtcctggtgccgcgtggcgacatcaccatccgccagttgccgccatccacggtcaaggtctccgacgacgcggtgatcgtcggctccgagcagcccgagcagcagccgctgaagatgaagatggacatcgatgtcgaggtcggccaggacaagctggcgttttccggcttcggcctcagcgccgaactggccggccacctgcacatcggcgacaacctggatacccgcggcgagctgaacctgaacaagggccgctatcgtgcctacggccagcgcctgacgatccgtagggcgcggctgttcttcgccggaccgatcgaccagccgtacctggatatcgaggcgatccgccgggtcgacgacgtggtcgccggcctgcgcctgaccggcagcgccgagcagccgaccagcgcggtattctccgaaccggcgatgagccaggagcaggcgctgtcctacctggtgctggggcgaccgatgagcaccggcgaagacagcaacatgctcggcgaggcggccctggccctgggcctggcgggtagcgcaccgctcaccggggaaatcgccaagcagctcggcatccaggacttccagctggacaccgagggcaccggcaacagcaccagcgtggtcgccagcgggaatatcaccgacaagctcagcctgcgctatggtgttggagtgttcgaaccggcaaataccatcgccttgcgctaccagttgaccaaacgcctctatctcgaagcggcgagcggcctggccagttcgctggacctgttcttcaagcgcgatttctgacggatgcgctgatacggaccatgcgtaacgcataaaagtgtgtcacttttagcggcgcatcgacgtcgtagaatggagcgggcgccgaccgccaggtcggtgcccgaagcaactcggcacaaggactggctgacatgatttccgtctatcaactcaaaccgcgctttcagaatcttcttcgtcccggcgtgcagcgcctctaccggcgcggcatcactgccaaccaggtgaccctggcggcctgcctgctgtcgctgctggtcggcgcgctggtcgccggtttcgccagccatctctggctgttcgccctcgttccgctgtggatgttcctgcgcatggcgctgaacgcggtggacggcatgctcgcccgcgagttcggccagaaatccgacctgggcgcctacctcaacgaactcaccgacgtgatcgccgacagcggcctgtacctgccgttcgccctgttgccgggagtcaacccgctgtgggtggtgctggtggtgctgctggcggtgatcagcgaatatgccggcgcgctgggcaccatggtcggcgcttcgcgccgctacgacggcccgatgggcaaaagcgaccgggcgctgtgtttcggcgtgatcggcgccggggtggccagcggccttttgccgctggcctggatcgactggctgatgttgctgatcgcggccctgctgttgctgaccatcggcaaccgcgtgcgccagggcctggccgagctggccgcgagtcgacggggcagcgacggccaggcctgagagggaacgggcgaacgccatggaggtgggcgcccgcaggaagcaaccccgccgggatcccggccggggcaacgacatagggacatcacatgcgcgacgtacaggaactgcgtttcaccacccacgacggggtagagctcttctaccgccactggccggccagccgcccggcgccggacggcacgcgccaggcggtgctgctgttccaccgcggccatgagcactccgggcggatcgcccacctggtcgacgaactcgacctgccggaacacgacttcttcgcctgggacgcccgtggccacggcctctcgccaggcgcccgcggcgacagcccgagctttgccaccagcgtgcgcgacgtacagaccttcgtcgaccatatccaggccgtccacggtatcgccgaagagcggatggcggtggtggcgcagagcgtcggcgcggtgctggtttccacctgggcccacgactacgcgccgaaggtgcgcgcactggtgctggcttcgccggcgttccaggtcaagctctacgtgccgttcgcccgcagcgggctgaaactgatgcgcctgtggcgcggcaatttcttcgtcaacagctatgtcaaggcacgcttcctcagtcacgacccggagcggatcgcctcctacgacagcgacccgctgatcgccaaggcgatctcggtgaacgtcctgctcggcctctacgaagctgccgagcgggtggtagcggacgcacaggcgatccagattcccacccaactgctgatttccggggccgacttcgtcgtccatcgtgcgccgcaggagcgcttcttcgagcgtctcggcagcctgcgcaaggaaaagcacatccttcccggcttcttccacgacacccttggcgagcgcgatcgtcacctggccgtcggccgtgcccggcgcttcctcctcgaggcattcgccacggcacctgaacgaccgagcctgctcgatgccgaccgcctgggccatacctgcgccgaggccgaggcgctggccgcgccgttgccgaagaactcgccgcgcgatctctactggcacgccacccgtgccgggctgcgcctgggcagcctgtggtcggacggggtcaagctgggcttcgacaccggcttcgattccggcagcaccctcgactatgtctaccgcaaccagcccagcggcagcggcccgctgggtcgcctgatcgaccgcaactacctggactccatcggctggcgcggcatccgccagcgcaagctgcacgccgaggagctgctgcgcctggccatgcagcggttgcgcgaggagcagcgcgaggtgcgcatcgtcgacatcgccgccggccacggccgctacatcctcgaagccctgcaaggcgtcgagccgctgccggaaagcatcctcctgcgcgactacagcgagatcaacgtgcgtgacggcagcgccctgatcgaaagcaagggcctcgccggcatcgcccgcttcgtcaagggcgatgccttcgatcgcgccgacctggcggcgctgcaaccgaagccgagcctcggggtggtttccgggctctacgagctgttcgccgacaaccgcatggtcggcgactccctcgccggcctcggcgaggcgctggaggagggcggctacctggtctacaccggacagccctggcacccgcagctggaactgatcgcccgcgcgctgaccagccaccgccagggccaggcctgggtgatgcggcgccggacccaggcggaaatggaccagctggtggccgccgccggcttccgcaagatcacccagcgggtcgaccagtggggcatcttcagcgtatcgctggcgcagaaggtcgcccgctgatggcgccgcgcgagccgggggtactgaagcgggcggtgctctggctgctgttcctcggcccgttcttcttcgccagctatggcctggccaactggttgaccagccagcgcggcgacgtcggcagcctggtcttcgactgggaacgcgggatgccgctgtggccctggaccatcctgccgtactggtcgatcgacctgctctacggcctgtcactgttgttgccgcgggacaagcgcgagctggacacccactgcctgcgcctgctcagcgcccaggtgctgtcggtgacctgcttcctgctgttccccctgcgcttcaccttcgaacggccggaactgggcggcgtgttcggctggctgttcgacgtgctgatggggttcgacaaaccgtacaaccaggcaccgtcgctgcacatcgccctgctggtagtgctctgggtctgctacgcgcgctacgccagcggcgcctggcgctggctgctgcatggctggttcgcgctgatcgggctgtcggtgctgaccacctggcagcaccatttcatcgacgtgcccaccggcgcgctggccggttggctgtgcgtctggctgtggccgcaggcgcagcccgcgccgttcgcccgcgccagtctgagccgcgaccggcaacggcggcggctggccgctcgctacggcctcggcgcgctggcctgcgccgccgtcgcctttgccgtcggcggtgcggcgttgtggctgtgctggccggcgctggcgctggcgctggtggcgctgaactacctgctgttcggcgccgccggcttccagaagggcagcactggccgcctgagcgccgccgcgcgctggctgctggcgccatatctgcttgccgcgcggatcaacgcctggctctggacccgtcgccggccgcagccggacgaggtgctgccgggcctctggttggggcgcctgccgtcgtccgcggaactggccgacggccgcttccgcgcattgctcgacgctaccgccgaactttcctgcgagccgcaggggctggcctatcgcagcctgccgttgctcgacctggtcgcgccggacgtcgaggactgccggcgcgccgcggtgctgatcgacgaactgctggcgcaagggccgctgctggtggcctgtgccctgggctattcgcgcagcgccacgctggtcgccgcctggctgctgctcagcggccgcgcggcggacgtcgagtcggccgtggccgtgttacgtcgggcgcgaccgcaagtgctgctgggcgaggcccagcggcggaccctcgcggcgctgagcgggagcgtgccggagccatcggcggaactgggcgaggtgcgccatgcctgagcaaaccctggccctggtggcggccctgctgcgccgtggccgcgagcttgaccggctgtccgccgcactgaccctgctggccatcgggctgggcctgtaccaggccgtgcagggcatcggctggcgctatttcgctgcggcgatgctggcgatcgccatgctcggcctgtggcagaagtactgggcgctgcgagtggccctggacgccgaactgttcgaacgtttcagccgcgtcggcgacaggctggaagcgcagacccaagacctggaccgggccctggccgatctcggcctggcccgagcggacgccgcagggcgcacctggaaccagcgcagccgcggcgccctgcgcctgctacgctggcaggcgctggcctgtggcgcccagttcctgctggccttgtcgtgcctgttgtcgatccctctattcaacgctcaaacctgaagagtcttcccatgctcgaatcagtcgtcgcctatggcatcatcgccggcgcccgcgccatcaccggcttgcgcagcctctggctgggcaccacgccgatccccaagcaacgcatctattacgccaaccacagcagccatggcgacttcgtcctgctctgggcctcgctgccgccggaggtgcggcggcgtacccggccggtggcgggcgccgactactggaacaaggccggcctgcgcagctacgtgatcaacaaggtgttcaacggcgtgctggtcgaccgccagcgcagcgaggccaatgccaatccgctcgaacccctcgaccgcgccctggacggcggcgattcgctgatcatcttccccgagggcacccgcaacctggacgacgaggtcaagctgttgccattcaagagcggtatctaccacctgtccctggcccacccggacgtcgagctggtgccggtctggctggccaacctcaaccgggtcatgcccaagggccgcatgctgccgttgccgctgctctgcaccctgagcttcggcaagccgctggtcgccacggcggaagaaggcaaggaggcgttcctcgaacgagcgcgcatggccctgctggacctggcgccggaagaggaggcctgagatgaacgaacagacctggatgctcttcggcgggatcggcgcgctgctgctgctcgcctcgctggtcggcttcgtcctcaagtggcgcgccggtcccggcccgaacgcggtgatcgacaacctgaacgcgcggatcaacgcctggtgggcgatggtcctggtgatcggtttcgccttctggcttggccaggcggcggtgatcctgctgttctatggcgtgtcgttctacgccctgcgcgagttcatcaccctcaccccgacccggcgcagcgactacccggcgctggtggcggcgttctacttcgtgctgccgatgcagtacctgctgatctacatcgactggtacagcatgttctcgatcttcatcccggtgtacgtgttcctgctgttgccgatcctcgcctcgctgggcggcgacaccaagcacttcctcgagcgcgcctcgaaagtgcagtggggcctgatgctggcggtgttctgtatctccttcgtgccggcgctgctgaccctcgacatccccggcttcgaggggcgcaacctgctgctgatcgcctacctggtgatcgtcgtgcagctctccgacgtgatgcagtacatctgcggcaagctgttcggcaagcgcaagatcgctcccaacctgtcgccgtcgaagaccgtcgaaggcttcgtcggcggcatcgccctggccaccgccatcggcgcctcgctgtggtggatcaccccgttcaacctctggcaggcggcgttgatcgcgctgctgatcaacctgctgggcttcttcggcggcctggtgatgtcggcgatcaagcgcgaccgtggggtcaaggactgggggcacatgatcgaaggccacggtggcatgctcgaccgcctggactcggtgtgcttcgccgcgccgatcttcttccacgtggtgcgctactggtggacgccctgaggttcgcctggcgccgaggggagcggggcggttgccgatggcggccgccccgtcgtcgttttcctgagagagagtgagaaataccagggagggggagcgcgataaagtgggatgtactgggacggatcggactatagcgggatggggcggtgaaaatgttttgccactggggaaagaaaaacccggctcattcggccgggtcaaaaaggcccaactgatcggttcggcgttgtctccggtgctttcgaacaacgctgtagatccagtcctcggtgacgccgaactcccggaccagtttgtcagcattcgagccatcgtaccgctgcagtatatgcagttccaggcgcttgcgcgccagctcatccttgaccgggaaaacaaacgtgatgccggcccagcgccgatgcaactggaacaccagttcctctgactcagatactgctttctcccgagagagcccgttacgcacgaacgcctcgacgatcagttcggccaactcgctgagcatgttgttccggcggcggatctgctgcgaacggatctccttcattattacctccgcttgctatctgcggccgcctggagcgtttccaccagggccttgaggattggacgctgccgccgccatcctttcggcaactgttccaagccggccgcctgttctggatgctcaatgcccaggccctggcagagccgatccacctcggcgaggaggtaccgtttctcctgctcgacgtgcagcgctgccaggattgccatgagctgctctggcttcttcagccaggcgaccttggccacgccgaacatctgcttggcgatcttgtcggcgtaactccagggcagtttcatctcggccagctgcgcctcgatgacctggacctcggcgggtagctggctgaagttatgcggcttgccggctgctcgcttgctgggctgtggttgccagcccaggcgcttgaactccgtcagcaactgctcggcctggcgcaggttcagatcccgcgccgaccccttgccgaacatcgcctgcagcttctgccgatagacatcgtcctgcaggccgagctgctgacgagcgatgtggatcttgctgagcagccccctagcgagtgccatggaacacctccatgccatgccgacgacccagccggcgcagctcagcatcgctgacgcccagttcgcgagcgagcctggccgtctgcgcggccagcagcgcctgggcggcgatcatccggctcaaccagaccttcgggttcacgccaggagccggctgcaaagccggcacgggcgctggtgagcgttgaggctcggtcttggattgcgcgcgcggtgcggcaggcttcgctttgagcgacgaattctcggccagggctccgttgtataccggcgtcttcatggggttgatgacgaaggtgtccggcagttcgcgcattttgtagccgaccttctcgatctgcccgccgctggccaagaactgctgaaccagctcgtccagttcctgggcctcctgtcgctttacgtcagcatcacgccgaggcggatcgccggcagttgagtggtagcgctccatcaccttgcctccttgttgagctgtcgaatgcggctgtgcagcttcttctcgacggtcttctgcagaccgggtaccgagagcgcagcacggcattgctctagatcgaagctttccagagcgcgcagccgatcatcagcactcactgcaccgtagtccttgtcaggacggatgaacggattggattgcgacatctcataccccctgagtaagccgagccacggcctggtgcccgatcccctggtgcagccgcgcgcgcttgcccgcggcgtaccccgcctcactggccacttcgtcacgtgccttgagcttgcggcgcttcatctcgaacttgccgacgtcagcgtggtgcttcgccatgtacgcctggatcgcgtcggcgatgttgtcgtcgacgcccgcgaactggtcgaccttggcgtacacggcctcgatccatccatgcgcgaaggcatctccacgggctaccttggtggatcgcttgcagcgtttctgcgtgctcaggaagtccttgcgcgccttctgcagctgtcgctccagcacctggtaggcgtagccggtcagctctggcgctgccgcgcagccgacgaacaggaacgaagcgctttcgaaataggaggtgcagatgatcaggtgcgtgccgaaggcatggcagcacacttgagcgaggcgcacccgccaggccggcggttttccatccgagccggcgggaaccctggcctcgccagccatgctggccagcacgtcgcccatctccaggttgtaggcttccatcagtttgtgggcatgacgcagcgcgatctcggcctcgttcgggttggaaccccgccccttggccatttccaggcacttcttgatcttgtcgaggatacggtcttggtccatgtcacacccccgcgatatcaagaggaatggagcggtactggtcggtgtccccgacccgctcctggatacgcacgtacgccttggtgctcacgacctggacagcctcgccgatggcctgcattgcacgctgccaacgttcgtcatcgatctgcaggcggcgcagggcaagcacactgccggtacggatgttccctgcttggtccacgcggaacgcatcgttgatcagcgtgatgacctctgcgcgagcgccttctgtccattcgtggaggcactcgtcgatcaacgccttggccgcctgcaggcgctcgtcgaaggcgatgttgtcggccatggcccgaatgaccttgtagcgaccgtcgaagctgaccagggaggcgttgcccttcttgccacctaccttcgcctggtactgctcggccgacagtgtgatgaaggcttcgatatcgccgaatgtcgccagtttgaaatccagcaacgccttgttcagagccttccccttggcaacgatctcctgcacaaggcggtcgcgctccaggtcgatgggcttgatcatttcttcaggtaccaggcgccccttggcgtccatgcggtacccggcgggaacatgcactgcttgttcagccatgggaggaatcctcaattggagagaaggttttgcacccgcagcgcgggcagacgttgtcgctacgccaagactccttcgggtgcggcaccggacggagatcgctaagcgcgccgatccagcggcagcgccggcatttgaggcggcgctcagtcatagccatcctccagttgtcggttgtggcgggcgatgacgccttcggccatgagctgaagggcatctgcgggaatgttgatgtagtctccatgggccagggcctgcacgaacgcttcaagcggatcggctccggcgagtgcatgccccttcgcccaggacacaacacgcccgccatctacctttctgggaacggtggtgccgctggcgccctcgatgacgagggtgtcgtaacgcgtgctatccctcatcagtgcaccctccctgctgattgctgagcgcgccgttcctgcaggtagaccgccatgcactgcagctccgcatgcagcttggagaagtggccggcgatgaagaggtcgatgagcttgaccaacatgctgtccagcttgtggctgatggtcttcagctccaccagctcctggtccttcgcgaaaccatcgcgcaaaacgtccttcagggcttcccggcagtcctgctcgctcatggcgtcaacatccatcagcggggtgtacgcgtgggtgatgacggtcattggtcttgctccttcaccggggtcgtccagcccacatcgacgccgagcaggctgacgagatgcaaggtgaccctcccgcgggtggtctgccgaatgccgcggaggacaccctcgaaccgctgatacaggcgtggtgcgtcttccgcacgaatgaacagccggcgatcgagcaccgacgtctgatcaatcggaatgccggccttgcgcagggcgcgggtggcgttgttgacggcatccaggcagcgggccaattccggtgtcagcacggtgcagagcggcagatgggtagctttcggatgctcttcagggaggcggccagtgatcggtacgacgttcatctcacacccccctgatcacatcggcagtgacgagcggttcgccgacatgcaccgccagattcatcgccgcgatcatcatgttgccgatggccagcgggtagagctggctcgtcttgtcgcggccgctggtgctcaggcgctcgatcagcgcctggatgccgcttgcgtctaccacctcggacaactgcttgccagcccggccgaagcggaactccaggtgcttttccacggcagcaaccgggatcgactccagctctacgatctcgatccgctgcaccacctcgcgtacgtcaccgttgcgcggggaaagcttggtgcccagttcaggctggccgatcaggatgatgctgaccagcttggtgaagccgtcctccaactcacgcaggcgcttcaggtgcttgagcgtggcgatcggcaggctgtgtgcctcttcgatgatcagaacgtgcttgaagccggcggcatggctgaccttcaaggctcggtgcaattgggcgaagcgtgcctccgggctcgatttcggccgctccagtggcgcaaccgcagccatcatggcttcggcgatgtgggtgacacgcaaggtcttgcccttggtatcgctgtcctccatggccaggacgtagggctcgatagggatcactggagcattctcggtgttcaggcggtgcaccagatcgcggcgcagggtggatttaccggcgcctgactcacccaccaccgcaagaaagccgtcatgtcgggcgacgtgatacatcgcctcgcggacgtagcgaatgtcggggctgacgtacatgtcgtcagcgctctgcagctcttcgaaggggtcacgacggatgtcgaaagccttcttcgtcgctggtagcagtacctgtttgttcattaccatggggtcgcactcctcgttttcttgaacgttttcgggggttgcaggagcctcggcgttggcgcgccggggctccacttcttcaaatgcctggcgcacgtcatcaaactgcgcgccatggcccatcaggtattcggtgatccgccaagccaactgttgctgattcagcgatttcggccagaggccgtgattgatcagttgagcgatcgccgccgggctcaggtcgaccgctcgagccaggtcggcctgggtcttgctgaccccggcaagcacttccttgagtttcaacatcagttgcctcctacgacgcgcaggccaggccgggccggcttgcgcaactggttggcgatggcgtcgagctggtcttccggcacgccttcggggtgggtcttcttgagccaggccatcgagtccgtggtccaggcttcacccaactgcgcgcgtagacgtttggccgcctcgacatgcggaaggagcggaacctctacgatgggggctaccaagctgtgttccgtgccgcgtcgcggcatgaaggtgggcagttgggtgtcgtcgatatgttggaagggcttcaaggcaccgccgaacggaacagccttggccttgcgcgcagcctgcacttccgtttcgctttcgacgccataggccagttggtcaacagctttgcgggccttctgcgctggagtctcagcctgacggctgaacgtctgcccgatcaccggtgaagtggtcgcgtagccgccctcatccttctcgaccttgggaaggacatagaagacctgacggccctgctcgttgaccgtgaccagttgcactgcatcttcgcgccagggattgcgagtgatcagcacgcggtcgttgacgttcacgtccgggacaaccgaaatgtcgtactcgtaccctccgaacgagacgcgaagtttggccgtgaccttccgagactctggtgccctcactgcaagctcccggcacagctcgaccgttggcgccttgatcagttggtcagcccggatggtcatccagagttctgacctggtgcgcctatgccggctgtggacggcggtcgcattgaagtgggcgcgccacttcttcgcctgggcgttgagttcgtccagatcgttgaccggttcgaacttcagcttcgactcgaacttgcgctcgatgatattccgggcgttctcgaccgagcccgtaacccgcgccgcgcctggcgcgtgcacgatgacctcgatgcccagggagcagcagaggttcttcgacatcgccgagatgttggccgaaccagggtccatcatcaggatgcgtggcacgccatgaagcatgtcggctccaccgcgctcttgcatggcctcgatcagcaccgtgcaaaagttctcgccactctcggcgcccatcacatagcggacgtagatccagccggtgtagtgatcggtgatctcgtaggaccacacacggtcagcggccacgcgatccaggttcgctggcttattcttgtagaactccttgcgatccatcacctgcaggccgctagccttcttgttggccccaggcttcaggtagtagaggacgcagagggacgcatcgatctgccagacgtggttcggatgcaggctgcgcagttcggtgaccggctccggcgccaatagctgggatggatgcaggcggtagccgtgcagcgcgcggctgatcgcgctgatcgacatcgggcggatctctccggtgcgtcggtcgacagactccgcacggatcaagccgctggcgcgaagatcctcgaccgcatcagcaacggaatacaggcgcttcgcgttatgtcgggccgagtggatcagcgccgtgctgatcaccagggcctcgtcacgccccaggcggctctgccccgagtccttgcgccgcttacgcggtgcgcgctcacgtacctgtacatccttcagcttgcggtacagcgatgccagcgacagacccagctctgccgcggctgctttgcatagcgccgtgcgctgcccctgaccggcgctctgtagctgccggtcgaggtcaaccaggcgctgggtgatgacggcagacacggccatgatcaggctcccactccgtccgcgaactgggcatccagggcggccatatcggcccccacccagtcgggtgcctggtcgcgaccaagctctgcaggcaggtcgaactcgttgcgtacctcctccaggagtgattccaggtgaacgatcagtgcagcctggaaagcgcgatggtcggcaccttgctcctcggcctgctcggccaactttgcgaagccttcacgcagttgccccatgatcccgacctcgacctcataggccatggacgtgacttcctgacgcagctctgccgcgcgctggtcggccgtcatggtttccacctggcggcgtgtcttctccagttcgagcttggtgttctgcaggttctcggtggtgttggccagcaggcgcccctgcgcttccttgtcctcgcggaggtcgcgcagagccttgcgcagctcgcgggatgtcattcgatcgatgtcgtccagatcaaggccagcgatcgttcctccgtcagccagcgcagccaggtcttcatcatcttctgccagcagctcgaagagcttcgtcttccccaaaacggcaagcgcttgccgttttgactccagcgccggagagagatacttgaacgcggcctgcatcatgagacgcgccgtgcgatccgcgagtccgagctgttcagtgacgatctgagtgaagtcgccgtggggctcatgctctttcagcacgatcaggcgctttccggcttccagcatggcttctgccgactgggccatgtagaagcgcgcctcattgaccacgcggatgcggtcgtaagggaggccgtcgccgaactgcgccatgacctcggcactgtgctccgtcatggtggcgatgttctggttgatagcggcgctatccagttccggcagctctactgcgggtttcggtttggtggcagtacgtcccatgggtatcccctcagatcatggagccggcagcgacccggcggttgatttcgttgatgcggttctgcatgcggctgacgtgatccgcatgggcctgggctatctgcagcatgctgacgctgtgagcgaatcggccgtcttctctacgctcggccaggccggcctcgatgagggtctgcatgtagcgggtgatgttggccgggctctcgcctagggccttggcgacttcgccattcgaaaggcccgtcaaggtgtgtcctttcagcgcgatcagaacgcgcaggacgcgcagcgctgtttcgttgacgcgtttctcagtcatcggaatctccaagttcgagctgtgggtgttcgtgttgggtgacgtttccgtggtgccatgctagggactccaggcccgcccgcagcgcgtccaaggtcttgtctcggtcttggctgccggcatggaaagccaggagcgccccaacggcgtcatgcaggacggtctgcaactgctgcacatccttgggcgacgtcgtgcgaccagtcgggatgtcgatgaggagctttccgtgggcggccgccaggtagcgtgtgatcagcggaatgccagtggctttctccagaggcaccaccaggcacagcggcaatcggccgttggccatccacttgtagagactggattggttggtctgccccaggtggtcgatggccaggcgctcgaccccgcggttgtacctctgcgtaccgtgctccacgcagccctcaatggatgcacagggcgagcgcggcacccaggtcttccagttccggcgcttcattggacggcgctccagaagcccctctggccgtcatccaaacaaatagctgttttcaccgttggcaaagctgttgccacagcgtcagtctgatgaggtacattcacattcgtcggagagactgacatgactacccccgatcacctggttcttgatgcgtcgatgcgctcggcgtttgtggctcttgcgcgtcgcctgtcgattgatcacgggctggatctggacggcctagccgacgatctggagacgctggcggatgctcagccgggcgatatgtggcaaatgccccatcgcgatctggcaggggtgctgcggcatgttgccgagcggacgcaagtagccgcgagctgacctcgaaggcttcgtcgcgacttaggctgtgtttgaacagccgtccagcgctgatgagcatcagccggtcgatgaggtgttcggcgcctggtgatgcaacggtccggtccaccagcaggaggctgctctggtgcgcgtcggccaggtgccaggagatgtccgaggtatcgccaggggcgcacgcgatcagtgcatcgagcgcggcgcgccaggtgtccatcggggtcgggatcaggtcgatgtgctcgacaggtggctgggtgcggggcatggcggtgttcctcacgcagcagctacagaaggcttcaggccgagcttcacagctatttcgtgggcttggccgtagttggctttgagttggccattgagaacgcggtagacgtcgttacgggcgtaaccgttttcctttgcccactcggtgaaggttttgccggcctggcggaagcgttgcttcacctggtcggccgtgagggctttggttgcagcggccatggcagtggctcctgtaatgcaaagatgttgcgggtttgtatgaatgatgatggtcccaattatgggactcgtcaaggtatttgcggggacacaattgtccataggtcggcgaatcaaagaggagcgcgagcgtctgggttacacccagggggacttcgcggaacttgtaaatgcctccagaaaatcccagatgcgttgggagcaagaaggcggcccctctccagacgccgaagctctagctatctggtcgtctgaaggggtcgatgtgccgtatgtactaacaggggtgcgttcaagtagaggcacgaaccagcatctgccagcagatgagcaggttttgctggaggcttatcggggccttactgcgagcaaaagaaaggagctgctggctgcgctgcttactggccaatctgggaagaagctcgccaaatctggcagcgtaaccgtactgggcagcggtaataggacggcggggcgggactaccaagagaaggagtgacccgtgagcgacattgacgttgatggcgatcgcaaccgggtcgcaggacgtgacttcattgaggtccatcttgcgcccgaacatgagccgctgtctcaagagcagaggaaacgactgaacttgctggtgaacaacatcagcagtgaatacaaagttgatccttggactctatggagagaggtcgttcatacccgtattggcgtgagcaaagtccggcagattccgaagagcaagttctcagaggccgaacgagcgctgctggaacacgcagagcacctacattcgttgtcacatgccaaacgattggttgcagaggtgctgcagatagccaacgagcgagggctctatcaggacctcacccgctactgttcgagggagttcggcttgacagtgctcaacaagctgaaccctgagcaactgaagcaagcactgcgctttgtcgaggatgctgccggcctttcctcgcagcaaaataaccagctacctgcagaccggtccttggagggtcaagcccacgagcggcacggttcgggttggaaggcgtttgtcatcgaagccagagccatggttgttgcctaccccattcaatgtggactacttgctgctttgctcgtggtgttggggaaagcaatttagtaagtgaaggcgctcgcgcgtcgctcagcaagcgagcagtgtgaccagaactgaatttcgaaaggacacgggacagtggaaaggctgatatttaaggggccggtttggctgctaatagctgcatttgtcgtagtcgctggttgtgcgacggccaccataggaaaaccatttccggctagcagcgtaggtcagttgcaattgggtgtttctacaatggaggatgcgcgccggttactcggcgacccacatcaggtagaaacaaatcaagcgggtgaacagctactcatatggcagtacgttcgctcagatgccaccagcggtttcgcctctgttgatgttaagaccagtcagcaattggccgctctcgtattcagcccttctggtcgcctattgcgcgttggcaggttgatcaacacacccgctccattagcagccccacccgccctccatagaactactggctcagatcatgccttgcagactcgcgaatcggtccaagagcaactggaccaactgaaccagatgcagctcccttaccaggaataccagcggcggtatcgggagattacagggcagtgagtagggatactccatgctgccccgtccggccaatcgattgattttcgaactgccgaaaagcgacctcgcgcgcgcgtgacgatgatgtccgggcgtcctgcaggagcaggatgcccatcagttggccagggatggccaccctatcgggagcatcgtcatgtcatcgccgcaaccccggcgccgccgcgcgccgcgcatgaccagctggacgctggtcaccctcgtccttctgatcattctcgccgccattcgcccggagcagctccaggtcgttgcctacaagctggtcctggtgaccttgggcgcggtggccggctattggatcgatcgcagtctgttcacgttcgcggctcgcccgcatgaatgctcggccaacctggaggtcgtaggtgcctggctgcgccgctcgctgatcgtcctgggctgcatcctcggcttgaccctggggctgtaacgatggggattccgcagacgatcctgatcgttgccgccatgacctatctcctgtcgtcgtatcgatcggatggtctcaccaccagcgtgaacgtccggcgccgagcatgctgggtcggtgcgctgatgctcctgctgctggccggcggtttcttctcgtcggccaaggccgatgagatcccgcgggccgccgagcagtatcgccgcgtgctggttcgagcggcgcatgctgagtggggactgtcggcgccgatcgctacgttcggtgctcaagtgcatcaggagagccgctggcgtgctgatgcccgctcgcccgtcggcgcacagggcctggcgcagtttatgcccggtaccgctgagtggatcgccggcctgtatccggccgccctcggcaccaaccagccgttcaatccaggctgggcactgcgcgcgctggtcacctacgaccgttggctctacgaccgaaaccaggcctccagcgagtgtgatcgctgggcattcgtactgtccgcttacaacggcggccaagggtgggtaaatcgcgaccgtaagctggcctcggcatccggcgccgaccagctggcctggttcgattccgtcgagcgcttcaacgccgggcgctcggccgccaacttccgcgagaaccgcaactacccgcgcctcatcctgcttcgctatgagcggatctatctgcagtggggcgacggcgtgtgcggagagaggtacaccctgtgagactgtcctccagcattaccttggctctgaacgttacctacctcgatctggcggtgattcagcggctgttcgcaggcagtcgcgacttcctaccggcacctgagctgtattgctcgccagtgccgcgcgagcggcgcggtaagtccggtgtggctcgggcgaaacgtaaggcacgcaagtacaagcggaggaaccatggtcgtccttagcctcctgcgcaccagcacgttctggctcgcgctgagcgcggtgctgtgcggcgcagccgtggtgatccacggctccgcaagctacgaccgtgggtacgccaccggccgcgccgagggtgacgctgcgctgctcaacctgcagctgcagcacaccaacgaacgcgcccaggcccttcaggacgccctggtccagtacaagcagcaggtcgcgcgcgccaaccaggccgaggagcaactgctgcaggtacagcagcaactgaccgacacccgacaccaactccaggagcgaatcgcccatgtatcgaccgcctaccgagcggcacctggtgctgcgcctactgctatccctcgctgtgtcttcactcgcggctgggtgcgcgacttcaacaccgccctcggcgccggtttgcccgccgcaggagcgcgcgccgattccgccggcgctcaaacagcgacctggcccgccgccggttctgacgccgagctattggaaagcggcgtcactccggcggacatcctggcctttgcccaggactacggggcctggtctcttcgcaatctcgctcagctcaacgcactactggaacaaggggaatagggaatgaaggtcgagctggaactgtggcagttgatcactctgctgctgaccttcctcggtgcctgcgcgggcggcggcaagctgctgctcaaccagatccagaaaagcctggattcgcgattcgcaagccaagaccaggcacgcctggcgaaccatgaacagctctcctaccggctggacgccatcgagcaggccgcgcgggaagaaaccaaccagtggcagcgcgttgaacgagaactgatgagcctgaaggcggagctgccgatccagtacgtccgccgcgaggactatatccgcggccagagcgtgatcgaggcgaagctcgacggtttggccgtgaagctggaaaacgcgcagctgcgcagtctgatgggagcaaaaaatgcaaattgacctggccaagacccggcgcgaagccctgcgctggctgattctactgaccctgaacaatgctcggccggtgggcgcctacgaggggccggtcctctcggtcgcacagagcgagtaccccgacgccacaccgctggagatccgtcgcgagctggactacttggccgaccgtgacctggtgaccctggtcaaggaaccgtctggcaagtggttcgccgatttgacccggtacggcaccgacgtcgccgagtacaccatcgactgcgaacccggcatcgcccgccccaagaagtactggtgacgaacaatggggcggaaatcatcgatctcccggctaccggatcaagtccgggcctacatcgaggggcgcctggccgatggcaggatgacgctggacgagctgatcgcggacctgcaggcgcagttcccgagccaggccgaggccggcgagctgcccagccgtgcggccgtgcatcgctacggccagaagctggagcgacggctggcggcaattcgtgccagcaccgaggcggccaagctgatccgtgcccaggccggcgacgacctggacgcacgcagcgaggcgctgacggcgatgatccagtccgagctgttcgagtcgatcatctccctgcaggaggctggtgatgaagagatggacccggccgatcgtgtcggactgctggcgtcagcggcaaagaacatcgcgacgctgacgcgctccagcgtcacgctgaagaagttccaggcagaggccgaggaacgtgcgcgccaggcgctgctcgctgagcagaaggccaagctggatgcgatgcccagcaagggcggagtaaccgaggcgaccaagcaagcgatccgggaagcgctggggatcaactgatgaagcgcaaaggcaatgccaaggtcatcccggccaaccccgatgcgatcttcctgccgtaccagagcagatggatcaccgatccgagccgcctgaagctcatgcagaagtcccggcagatcggcctgtcctggtccaccgcctatgctgccggtgagcgcactgctgccgagtccgcgcgagtggatcaatgggtgagcagccgtgatgacctgcaggcgcgcctgttccttgaagactgcaagatgtgggcggggatcatgaaccaggccgccaaggatctgggcgagatcgtcatcgacgtgaagaacaagatctcggcctatgtcctggagttcgccaatggccgccgtatccacagtatgtccagcaacccggacgcgcaggccggcaagcgcggcggacgcatcctggacgagttcgccctgcaccccgatccccgcaagctatggtcgattgcctatccgggcatcacctggggtggcgctatggagatcatctccacccaccggggcagtcagaacttcttcaaccagctggtgcgcgagatcgtagagggcggcaatccgaagaatatcagcctgcacacggtcaccctgcaggatgccctcaaccaggggttcctcttcaagctgcagcagatgctgccggccgacgatgagatccagggcatggatgaggcgcagtacttcgacttcatccgggcgggctgtgctgacgaggagtctttccagcaggagtacatgtgcaatccggccgacgacgacgtggccttcctggagtacgacctgattgcctccgcggaatacccgcagaccgctaactggcagcagcccgagggcggccgactgttcgcaggcgtcgacattgggcgtaagaaagacctgaccgtcctgtggatcttggagctgctcggcgatgtgctctatacgcgccacgtcgagcgtctgcagaacatgcgcaagtccgcccaggaagcgatcctctggccctggttccagcgctgtgagcgcatctgcatcgacgccaccggcctgggtatcggctgggcggacgacgctcaggaccagttcggcgagcaccgtgtcgaggctgtgaccttcaccccgcgagtaaaggaggctctggcctacccaatccgcggcgccatggaggaccacaaggtccgtatcccctatgacccgaagatccgcgccgccttgcgcgaggtcaccaagcagacgacggctgcgggcaacatccgcttcactgcggagcgcactgctgacggccatgccgacgagttctgggcgctgggtctggcgatccatgctgcttccggcctggtcgacatgcccatcgactatcagtccgccggcacacggacgcagctcaatgactacgtctccactccggggggaatcatcgtgccgcacggcttcggcgcggtgcgcggtaataacgactttggaggctattgatggaaaagcccgcccttggccgggagatcgccaccagtggcgacggccgcgacatcactcgaccctttatctctggcctgcaggtgcccaacgattcgatcctgcagcgccgtggcggcaacgacctgcgggtgtacgaggagatcctcagcgatgcccaggtgaaaactgtctggggccagcggcaattggccgtagtcagccgcgagtggaaggtggaagccggcggtgatcgcccgatcgaccaggctgcggcagagcacctggagcagcagctgcagcgcgtgggctgggaccgcgtcaccagcaagatgctgttcggcgtgttctacggttacgcggtatccgagctgatctacggccgcgacgaccgctacatcaccctggaagcgatcaaagtccgcaaccgtcggcgcttccgctatgaccaggacggcggcctgcgcctgctcacccccaacaacatgttcgagggggagccgtgccctgcgccttacttctggcatttctcgaccggcgccgacaacgacgatgagccctatggactgggcctggcccattggctgtactggccggtgttcttcaagcgcaacggcatcaagttctggctgatcttcctggacaagttcggcatgcccacggcggtcggccgctatgacgacaagaccgccacccccgaggacaaggccaagctactggcggccctgcatgccatacagactgattcggcaatcatcatgcccgccggcatgcaggcggagctgctggaagccgggcgctccgggaccgccgactacaagaccttgcatgacacgatggacgcgaccatcgccaaggtcgggctcggccaggtggcgagtacccagggcacccccggccgtctgggcaacgatgatttgcaggccgatgttcgccttgacctggtgaaggccgacgcggatctaatctgcgagtcgttcaacctcggcccggcccgttggctgaccgagtggaacttccccggcgcgcagccgccacgggtgtatcgcgtgatcgaagagccagaagacatcaccgccaaggccgagcgggatgaaaaggtgttccgcatgtcaggcttcaggccgacccgcggctacgtacaagagacctatggggtcgaagttgagtccacccaggccgaggccacggcgccgacgccttccaccgagttcgccgagggcgatcagccgtccgacccagcagcggcgatggcgccgcagctggccgaagcgatgcagcctgtcgtcggcaactggacgacccaactgcgcacgctcatcgagcaggcaagcagcttggaagatctgcgcgagcgcctgctcgatctagctccccagctcagtcttgatcaatacgcccaggccatggccgaggggctggaggcagctcacctggccggacgtaatgacgtccaggaagagctagatggacgggagcagatctgatggccacccgcgccgcatacggcggactctccttccaggagcagatccgcttcttccaggccaagcatccgtcgattgactacaacgcgatccgtggcgcggctaacgaccagtccttcgtcagcgccggggcaaatcgcgccgacctggtggcggatctgcaagccatcatcgatcaggccatccgtgacggcatgaccctggcggagttccgcaaggactacgacgcggtcctggaccactacgaatgggagccggagggtggccgagcctggcgggcgcgagtgatctacgagacgaacctgcgcaccagctatgccgctggacgctatgcacagctgcaagcggtcaagggcgagcgaccgttctggatgtacaaccacagcgatgccgtcgaacatccccgcgaactgcacctggcctgggacggcctggtgatccatgccgacaatccctggtggcgaacgcactatccacccaacggctggggatgtcagtgctcagtcagcgcctacgcggaggacgagctggcatcgctgggcaaggacggcccggacgagcctccgagcggccggatgcgtcggctgacctaccgcggcgaggttgtcgaggttcctgaaggtatcgaccctggctgggactacgcgccaggacggagcaacttcgaacagttggtccagggcgccctgcagaagaccacgccgctgccacccgaaccggctgcgaaactcaaccagcagcttctgcagaaccgctcggtggccaccgccattcaaaccgactgggagcgctggctcgatagcgtcgccaatgacccagtccgtcgtggccgccgggtccatgtcggcacgctgtcaccgcagaccgttgagggcatgagcgcagctggcgtggaagcccgcacggcagtcatcagcgtgggcgacagcgatatcctgcatgtgctgcgcgatgcgaaagccatggcgacaaccgccgcagggctgcccaaggcgttgtcactggccgagctagcgaccctgccgcagatcctcgcccagccgcaggccgtgctgctcgacgccaaatccaacaccctgatctacgcgttcgctgcacagcgtcgggaagcgggaaagattgcggtgctggtgaacttccagctcaaagggggcgaggcgaccaattccgtccgatctggatcgctgatcgattgggcggacgtggccaaggacgtcaaggcaggaaaactggtggtgctggagggagcgctgtgagtacccagggtggacgccacctccaccgtgcaggcgccatgtaggcccccgagccggaactggcgatttcccggccgccagggcacccacaacgtcaactcactataaccgatcggaggcagcatggcaggcatcaccctggaatgggacggacggcgagcactggacgtgctcaacgcgggcagcgcagcgctgggagatccgagcgggcttctgcaggatatcggggaactgttgctcaacatccatcgccgtcgattccaggcccaggtatcgcctgacggcacgccttggcagcccttgtcgccggcctacctgcggcgcaagcgaaagaaccgggacaagatcctcacgctcgacggccacctgcgcaacctgctgcgctaccagctggacggcagcgagctgctgtttggtagcgatcgtccctacgcagccattcatcatttcggggggacaatccagcgccaggcacgcagcagcaccgtgtacttccggcagaatgaacggactggcgaagtcggccgggagttcgtgcccagaaggcgcagcaatttcgctcaagacgtgcagatcggaccctacacaatccagatgccggctcggccatggcttgggacgtctagccaagacgacgacaccattctgcagcgggtagagcgctatctgcagcgcgcgctccgcgaacgcgcctgaaaggccctacacgcgcgaacgccggtttagtgctaccgtggcgcgccgacaacccgtatcgacgcctctcgaagcgcctagaccgtttataaacacgctcatcgggcttgccagggaacgatgtcgcgtgctttcgtagaaaacagcctcagacaccccagtcaccaattttcggtccgccgaaaagcccctgcacacacgctgcctcactctgggcggcatgaaaaagccaaccgccactctgccaatcctccccgccggccggcacgtcgctctcgatggtcgcccggtggagttcaccgaggccatcctgcaggagatcgcctcgacctacgatccggcgctcagcgaggcccctctcgtcatcggtcaccccaagctcaatgcaccggcctacggctgggccaagggcctggaggtgcgcgagggcatgctctatgccgagccgcaccaggtggtacccgagttcgcagaagccgcgaaccgcaagatgtacaagaagcgcagcgcttcggtgtacctgccggactcaccaggcaacccggttccgggcaagcactacttgcgccatatcggcttcctcggtgccgtgccgccggccatcaaaggcattcccgatgctcccttgaacttcgccgaggatgacggcgccctggccatcgagttcgcggaagcgccctacgcggtgacggctctgacagagatcctgcgccgcctgcgtgacttcttcgtcgagcgcgaaggcgccgaacgggccgaccagctcatcccacaatggcagttgtcctcgatcgaggaggacgcgcggcgagcagtcacccacggcgccagtgcccaggcgtcgttctccgaacccgcaatacccgcaatagaaggcgtcgacgccgcagcagcctctgccgccgctgcggaagagccgcagggcaccgtcaccccatccgacggtgcttccgcgtcagcggcagaggctgaccggacctctcacacatcacagcaggacacgaccatgcctgacgaagctgcgctccaggagcgccaacgccagctcgacgagcgcgagcaactgctggccacccgcgaagcacaggtggcccagcaaaaagcccaggaacatcgcaacgaggtcaccgagttcgccgaaggcctggtcaaggccggccgcctgctgccgcgccagaaggctccggtgatcgagctgctggtgagtctgcctgccgacacccccctggagttcgccgagggcgacggccaggtcaccaagccggcggccgaggtgctgcgcagcttgctggccgaactgcccaagcaggtggacttttccgagaaatccggcgacggcggcgacctgagcttcggcagtgctcacgccattgcagcgcgagcgcagagctatcaggaagaacagcggcaggctggacgccatatcagcacgaccgaggccgttacccacatcaccaagggagccaagtaggccatgaacattcccagactcatcaccgccaaacgtgccagcggcgccatcgccgcccgccgtatcgtgatccatggcagctcggacggcctggccgcccaggctgccggtagcactgcgctgctgatcggcatcagcaccgaaattcccgccgccgacggtgcggtcttcgacgtcatccgttccggcctggcgccggtcgagtacggcggcaacgtcactcgcggtgatgcgctgacggccgacgcccaggggcgagcggttgccgcgactctgccgccggccgccaccacttggatcatcggcttcgctgaactcagcggcgtcgcgggtgatatcgggtccgtctacatcgccccggccgttctgccggtagcctgaaggagcgctccatgagcaatgcaccatttcccatcgatcccgaactgacggcgatcgccatcgcctaccgcaacggccggatgatctccgacgaggttctgccgcgcgtaccggtcggcaagcaggagttcaagttctggaagtacgacctcgcccagggcttcaccgtcccggaaaccctggtcggccgcaagtccaagccgaacgaagtagagttcagcgccaccgacgaaaccggcagcaccgaagaccacggcctggacgcgccggtgccgcaggcggatatcgacaacgcaccgacgaactacaaccccctgggccacgcgaccgagcaaaccaccaacctgatcctgctcgatcgcgaagcccggacctccaggcttgtcttcagccccaatagctacgctgcgggcaacaagaccaccctgtccggtaccgatcagtggagtgacccgaccagcaacccgctgccgatgatcaccgatgcgctggatagcgtcattctgcgcccgaacatcggcgtgctgggccgtcgcaccgccaccatcctgcgccgtcacccgaagatcgtgaaggcatataacggctcactcggcgacgagggcatggtgccgatggccttcctgcaggagctgctggaactggacgcgatctacgtcggcgaagcacggctgaacatcgctcggccggggcagaacccgaacctgatccgcgcgtgggggccgcacgcgtccttcatctatcgcgatcgcctggccgacacccgcaacggcaccaccttcggcctgaccgcacagtggggtgatcgcgtgtccggctcgatccccgacccgaacatcggcctgcgcggtggccagcgcgtccgtgtcggtgagtcggtcaaggaactggtcaccgcaccggacctcggcttcttcttcgaaaacgccgtcgcggcttaggagtctgtgctcatggcccgcaaacccagtaatgacaaggtcaaagcagctgcacctgcctcacctgccaataccggcgcacagccgccggtggaggagaacctgatcgacggccaactggccggcgttcaactccaggacggcgctgttgttccgctcgccgaactgccggaagcggaactgcggcagatcggtgccgacctggagatccaggacgccgccacgctgccggtcgagcagctcgtcgctgccattcaggcgcagaaggtggtcgtgccggccgccgatgaagatggggtggtcaatcccgaagcggcggaatcgcctttgcggatcgccgacgaggccgggcgctaccaggtgctgctcagcgacggttcgctggcctatctggaagatctggtccaggaggatctcgaagcgctggctgcagcctgctacgaactggcgattcagtcgcgcggcggcgagttgggccggactatcggggtggactgggccgccggcctcaaggaccgcttcatcgtgcagcgcgagcgcctggaccacaacggggaaacgtacacccacggtgatccgatctacctggatagcactcaggctgctcagttgttgtcgcttggggcggtcagggcggagatgcagtaatggataaccaacatcgcaagatcagcggctatcgcgagttgactcaggacgacatcgacctgatgaaccgtgtcaaggccaaggggactgagctgctggagcttcaacgcgaagtctctgcctacctagtgaagtgccagtgcaccttggctgtcgaggggccaacagaggagttcagccgcttcctgaaggcagaaccccgccgctgggctgagatcgccaagactgacatccagacgggtgtcatggccctggtgcgcgccatcgctcagcccgagggctgctgaggtggctgtgtacatcacgctgccggagctggccgaacggcctggagccgaggagttgtcgcaagcggctacacctcggcctctccaagcggtcgacaccgagctgctcgatgccttgctgcgtggattgccggtagatcgctggacgccagaagagatcgaagtcggcgatgccacggtggaggtgatcaacagcgcggtcagcgatgcccaaggctacatcgacggcttcctccagcgccggggctacagtctgccactggccaagcgttacggggttgtcaccgggtggaccagggccatcgctcgctacctgttgcaccaggaccgcctggggccaggcgcagagaaagatcccatcgtgcgggactatcgcgacgccctgaaattcctgcagctcatcgccgagggcaagttcagcctcgggccggatgacccgctgaccccgccaggcggtggggttccgcaggtactggcgcccgctcgcaccttcagccacgacaccctgaaggactactgagatggccgaagggctctgcgcacccttcgatcacaacctggtgatcgatcgtctgcgtgaccaggccaaggtgctgaagcacatcggcggtgccgccgaactcggcacgatcacccagttgcgcgatttccgcacgccagcggcctatgtgctgctggcccaggagacgctctcgcccaagcccgccggccatgctggcggagcgacccgacagatggtgaccgtgcatttcatcgtcaccctcgcggtgcgtagctaccgcgacaacaagggagtcagcgcggcggacgacctgcgcccggtgctcgaccaggttcgtcaggccctgatcggatggaccccacccggcctgtccggcgcccgcgactgccaactggtccaggggcaggtggtggattacgacgcctctgtcttgatctggactgacctctatcagacccaacatgccatcgggagaccctcatgagcaccaagtccaccgacatctcgcccgccaaacgcgaggtcgtcaccttgatcgcggatcacacccatgccggcgagccgaaaaccaaaggcagcaagatcgaggtcagcgctacggaaaaagagtttctgatccgccacggcaaggtggcggagcctgtcaacccgtcggccgcgaaggcccaggagtaaccccatgtcactgatttccctgcagggcaaagtctggctcgccaaccgatcggcaacgggcaagtacgagaaaccggtctgggtcggcaacgccccgacggtgacgctgcaactggccaccgagaccacccccaagacggagagctactcgggcaaccgtctgcagatcgggctgctcgatcgtggcaagaccgccacgctcaacatcaccttggacgaatggctgccgcagaacctggcactggggctctacgccacccagatcgacatcaccggcaccacggtcaccgccgaaccgctgcccgccaccctggcggccggagacttcatccgcctcgaccgcccgctggtcgacgacgtggtattgaccgcgaactcggcacccctggtgctgggcaccgactaccgcatcgaatccgcagccggtggcttgctggagatcctgaaagcgcagaccgaccctgtcacggcggcctaccagtacgccgacgccaccagcctgacgatcttcaccagccgtccgccggagcgctggctctacctggatgggatcaacaccgagaccaacgagccggtcctggtcgacctgtaccgctgcaagttcaatccggtcggcgacctgtcgctgatccacgatgaatacggcaacctgccgctcaccggcgcggtgctattcgatgcgctcaacgccaaggacgccaacctgggcggttatggccgcatgatcaccaaaaaggcggcctgagcatgggccgtaaggtggcaaagcccagggcgccccgtgactcatccgcttccggccaggagccgggggcggatgacctggagatcctgcaccccgatcgcacggtggagatccatgggcgaacggtcacgatgcgcgagtatgggtttgtcgaggggctgaagctgcgagccacgatgcagccgttcctcgacgatctgcacgccatggtggtcaatgatcgaggcttgccgccgctggatcggatcattgacgtcttggcttcccaccactcgctggtcgtccagttgattgcccaggcggcagatgtcgagctggaatggatcgaggagttgccggcacggcctggcaagaacttgatgttcctctggtggatcgtcaatggccctttctttgtcggcgaggtgatggaccggatctccgccgagcgcgccgaactcagcagtcacgctgggccgacacctatgccagcctcatcgccggaggctacggcggcatcgccgacatcgggcgcatgaccgagcggcagatcctgctgctccatgaagccgaacagcgccgtcagttgaagaagcgcgagcaggacttcatcagcatcaacctggcattcgccgggggagaggaagcaaagcggcatctgaaagagctgcaggatctgctgaagtaaggaagggcaccaggtgctggagcggcaactccagtacctggtgccgaacaggcaacgcagtgccagcccagccaaggccctcccgctcacgtgagcacgggcgagcctagcagattggaaaaggtgttgccgagagtgaaagacgtgcgatgtggcggatgtcaccgcctgctggcccgcgcgggccgttacgacgaattgcagatcaaatgcccccgctgcggggcgattaaccatctgagggccgagagcctcctgaacgcgccatcgagcgcttgcccggagacctcatgtccgcccagcccatcatcccctggatagggggaaagcgccgcctcgctgaccgcatcttcccgcttttcccacgccactcctgctatgtcgagcctttcgcaggtggggcggcactgttcttcctacggccggtgccggcggatgtggaagtgctcaacgacatcaacggcgacctggtcaacctgtaccgcgtcgttcagcatcatctggaagagttcgtccgccagttcaaatgggcgctcagctctcgccaggtcttcaagtggctgcaggagacccggccggaaacgctgaccgacatccagcgcgccgcgcgcttttactacctgcagcagagcgcgttcggcggccgggtcgatggccagagctacggaaccgccaccacctcaccgcctgggctcaacctgttgcgcctggaagaagcactgtcggcggctcacctgcggctgagcaatacctatatcgagcacctcagctggcaggactgcctccggcgctatgatcgagagcacaccctcttttatatggacccgccgtactgggagacggagggctatggcgtgccattcggcttcgagcaataccaggagatggcagtgatgctccgccaactcaagggcaaggccatcatcagcctgaacgaccaccccgagatccgggagtgcttcgcctctttccacatcgagtcgaccgacatcacctacacggtcggaggcggccaaggttcggcagcgcgggaagtgctgatcttttcctgggatctatcagcagaacctgcaggccttttctgacctgattttcggccagtcgaaaagctcccggctcacgcgcgcgcgaggattgcggcacccccattgccgcagtcctcctcatggccaacaaagaactcgaactcgccctacggctacgcgccgatctcgcccagggcaaagctgctctcgaccaggtgagcgaatccgtgcaagcggtgggcgataaggccgaacaagctggccgtaagctgagcagcgtcggcgagtccgccgatcagcagacggcccgcatcagggccatggtggcggcctcgctgcaacaacaatcggcccaggatgctgcggcagccagtacgcagcgcctcaatgctgctgtgcaagcggggaacactgcctggcgcgatagcgctcaagcgcagtccaccgccatgaacgcctatcacaatgccgagcgtgctcgcgtccagcaggcggcgaccgagcaacgcgctgccgaggcggcagccaaggctgctgctgaaacagccaagcaggatgcggccgcacgtaagttgctgggtgccatcgatccgactcagcgctctctcgctcgcctggccgagcaggagcggcagttgactgagcatttccgggcgggccgtgttgaggccaatgcttatgccagcgcgctgaacaggatcaaggcccagcgtgacgtgctcactggagtgggtaacgaggccaaggcctcgaccctggcgctcaatggcatgggggctgcaattcgacgggtccaggggctgctgttcgccggcatcgccggttacggcctggcctctttctccaaggaaatcgtcaacaccaacctgcagtggcagcaggcgttgtacaccatggaggcagctacggggtcggcggcgaaggcgaggcaggagctggagtacgtccgcgagatctccgaacggctgggcctggagctgctcaacaccagccaggcctattcccgcctggtggcggccgcgaaagaaaccccagagctgggcagttccttgcgcacgatcttcgaaggcgtcgcctcggccaccactgcgctgcacctcacccgccaggaaaccaacggcatcctgctcgccctggagcagatggtcagcaagggcaaggtccagacccaggagctagttctgcagctcggccagcgcgttcccggcgcgttttcgcttgccgccaaggccctgggcaccaacacaaagcagctcagcgagtggctggaaaagggcatgatcccggcggccgagtttctgccgcggttcggcgctgccctgcaggaagcttatgggccagcctcacagaaagcggccaccggcttgcaggccgaactcaaccgtctggagaacgcattcactgacctgaagatccaggcgggcgagtcggggttcatcgacaccttcactcaggctgtgcgagacctgcgtgatgtgctgaaagatccggcggtggtggagggcctgaatctcctgatcaagggcctgggtactgccatcggttatgcggccaagggggctgcgggcgtcgtcaacgtcaccaagttcgtcgcggaggagattgcggcgcgcgtgaacggtcccgccggtgatgacgtaccgcggttggacgatgccatcgctcgggaaaccgagtacatggcaagggttcagtccgcgctcgacgaggcctacgagaagaacgaccagaagcgcatccagcgatacgaagaagcactcagcaaggcacaagcgcagatccagcaatggcaggaccagcgtgacgcagtcctgaacggtgccggccaggtcgcggcgctacccgcgactacagtcaccggcacaggccccaccaccaagacacccttcacgccatcaggcggcgaagacaaggccgctgcgcgcctggccaaacagaacgaagactgggtcaagcagttggagaaggaagcggcgacctacggcaagggtcgggctgcgttgcgtgagtacgagcttgaccaacgcaatctgacaggggccctggaagcccgtgctcgcgccgcctgggcgaccctggacgcggcagaaaagcagaagaaggccgacgaacaggcaaagaaagacgccacaaccctgaagcaactcaacctggactaccttcgggccaccggccaaaccgtcgaagcggccggcgccgagatcgagaagaagtacggcgacctgcagaagcgtctgctcgccacgggtgacaccgaaggcgccggcctggtcagcaagctgatgggaatcgagaaggccaaggctgagctgcagcagctccaggaccaggtcgaccggatcttcggcgagcagtctcggcaggagtcgagtattcaggccgcccagcaggccggtctcgtcagcgaactggccgcgcggcagcaactgctagacctgcatcggtccaccgccgacgaggtagagcaacttgtgcctcgcatggaagagctggccaaggcaactggcgatccggcagcgatcgagcgcgtgaaggatctccgccagcagctcgaaaacacccgcgtggccgccgaccagctcactttggctctgcgatccggtatcgagaatggcatgcaggatgcgctgcgcggtctcgccgatggcaccttgtcgctgcaggaggccgcggtttcgttcctgcaggcggtcagccgatcgctggccgacgttgccgcgcagcagctggcccagaaggctacagcagggctcatgagtctgttcggccaaggtgagcaagacaccagcatggtaacgggagctgctgctgtcacctccgccgcaggagcgctttccaccgcaggcggaactctggtggctggtgcggctgccattcagggagcagcagccagtcttgcggccgcgaatggactcgcaggtgctggtgccgctgccagtggtgccggtgcggcaggtgcggctgccggtggtagcgggtggtggtcctcgatcacaagcatgttcgggttcgccgagggcggccaggtccgcggccctgggactccaacaagcgacagcattccagcctggctttcggatcaggaagtcgtcatcagggccgcggccgcaacccagccgggcatgaccccgctgctcctggacatcaacaagcgtggttgggctgcgctgcatgactggtccggcgctgtgcgccacgcgacgggcggaatagccaccatccccgcgcccgcaatgcctgctccgggcctttctgcttcgcgcctgcaggagccatccaagaacttcagtacctcggtcgccaactcgatctacctgcacgccgttcaggacacggatcagatggcggccgacatgtgggccggcaaaggcggcgaacacttcctggtctggctgaacaagaaccgccaggccgtcaagcagattatctaggagtcccatggccaccgaattcggcaccgccgtcaaccacgccgacctggtcgagcgcctggtccagttcctcaccgcgagcccggacctggtcgcagctgggcaggcctacgagaaggttttcgacaacaccatccccgcgtccggcactgcgatagccgtgcgccaggtgaccctgcgcgcacctgggctgggcggcaccgatagcatctacatggggattcaaagctacggcgatacggcactggactactacaacctgcgcctgatgggcggcacagcgttcaatgctggggcaatcccgcccggtggtgactactggaccgcgtttgccaactacagcccgcgggtgcagttgctcgcgtggaaccagcccatgccgtactggttcttcgccaacggccgcaggttctggatcgtcgtgaaagtctcgacgatctacgagtcggccggcgctggcttcatcctaccgccgtgcccgccgtcgcagttcccgtatccgctggctgtcgtggggtcgtatcgcggggacgtcgctgtgcgctggtccgacgtcaccgaccggcacaggggcatcagcagcccctatgagcgtagctgctatctccgcgatcccgccgggcgctggctcggtttcactgtagacggaggggctgccaacgagtccgactacaacaatcggacgctcctcccgctgggctgcggccgttatgcgggcagcagtgacaccgtggtcaaacaactgcgggattcgttcgggaagttcccgctcaaggcgctgtcgttcgtcacccgcgaaaccgagggtcgccgaaacctgggcgacttcgacggcgctttctacgtgccaacgctcaactcgggcgccgaggacgtgattgtcgaggacggagtggaccacgttgttttccaaaccgcctggcgctcgggcaacccctggctctacgcaatcaggaaggactgacatggcctatttcacaggagcagcgaacagcccggccgacctgctcgccaaggtgcgcgtccacgccgagtcgctcggctgggtcaccgaccgcgcgtcggcatcggaatggctctgtcacaacgctgatgggtactggtcattcaatgccggagccaatcagtttcagatcgcgggcaatacggggttcgacaacgggctggcgtggaacgcgcagcccggtaactcggtgcagaacaacccttattcgtcgaaggggccgaccgtcgcacagctgagcggtgggccgttcacgcgctaccacctgtttgccacggcggcctatctgcacctgcacgtcgagatcgcggcaggtcagttccggccggtgatgattggctctctcaacaagcgcggggtcgaatacagcggcggccagtatgtatgcggctccgtaatctatcaggcaggccagatgctgacctcaaactggtcttgtcatccgttcgatggctaccacgttcgctatagcgacggtggttgcgtactgcgtgtggatggcctggatggcggcccctcgcccgactggctgccattcgactacacgacgaacatcccccggcgggtcatcgggccaggccgtggaaactacagaagtcagtaccatcctgacgtcggactgatcgacgccagcgcaaacgagctgaacagctcgaccaccactgtgccgtgcgccatctatgcgttcggcgctcagcagcgctcgcgctacgtgggcgaagtgccggactttggcatatgcaacatggccttcctcgcgcctggtgatccgcttgtcgtcggtagcgacacttggcgcgtctatccgttgctccaacgcggaaccgctaccgacttcgacagcaccagcgcctgggtcggctattgcttccgggtggtcgagtgatggcgacgtttccggggttccaggtgccgaagcctgtggaggggatcgttgctggcatcacgccgaatatcgacgccctggagctgaaccaggacatcagccttgcagcggtcgcggcctcgacctgggccggtgcctatggggcgcatcagccggtagaggtgatccattcgacctaccaggctgtccaccaaagcgctctggaagagaactactacaaccgcctctggttgattccgaccgcaatggaactgggcaacgtcgtcagcacccagatacgaccggcatcagtctggaacgcatatttcagtccgcgcacgctgaccgctatcgaccgcgaagccgcagacggcatcacgctgtctggccaagcgtcgccgccgctgggttttgccgcgctggaggaacgcacctggacggtcagcatcggcaccgacggtccgcccgtagtcaatgcccgggtcgtctggaagctccagggcgagccggacctggtgctggtcatcaccggcaatcggatcatcgcctggacgttcgccccggactggggcgacagcatcgtcgagcgcctcagcgcctcgacaaatattctgcaaagcgaatcggccgtgacccagcgccgagccatgcgcctggcgccgcgccgggagttcgaagcgaacatgtacgcggtggaccgcgagcggcagctgctggacatgacgctgttcggctggggcgcgcgcatttgggcgctgccgatctggtctgatatccagctgctccagcagccgctggcggccggctcgctgagcattccgtgcgacacggtcggcctcgacttccgcgacggcggtctagcgatgctgcgcggcgaggacgccttcaactatgaggtcgtcgaggtcaaggcggtgaccgtcgccggcctggacctggtccgccccgtccaggccacctgggtaactggctcgcgactgtacccggtacgcaccgcgcagctgaccgaacagcccacgctgacccggctgaccgataccgcacagtctgcgcgggtgtcgttcctggtgatggagcccagcgcctggcccgaggtaatgccggcgacgacctacagggggcggccagtgctggagcagcgcccggacgaaagcgaagacctcacctctaactatcagcgcctgctgtccaccctggacaacggcagcgccattccccgcgtgaccgacgtcgccgggatggcgctgcccgtcatcggccatcggtggatcggcatgggccgagccgagcggtcggcgttccgtagcctggtctatgcgctgcgcggccagcagaagccgctatgggtgccgacccacgccgacgacctgactctggtcgccaccgtctcgcagctgtccaccgcgctggacgtgcgcaatatcggctatgcccgtttcgccaatgggcgaccgggtcgtcgcgatatccgcatcgagctgtacgacggcaccgtctatcaccgccgcattctcaccagcaccgagctggacgccgacaccgagcgcttggccatcgacgccgccctgggccgcctggtcgagccgacagatgtagcgcgcatctgtttcatggcgctctgtagcgccgccagcgacgtgatcgagatcgagcacgtcaccgatagcgagggcgtcgcaaccgccgcgctgactttcaaaggggttcgtgacgatgagttttaacagccgcgaaagctcgctcgcggatgggcagccggtgcggctgtaccagttcagccgtggcgcgatccgctggagctacaacagcagcgaccgggacatcacctaccagaaccagattttccgcacggtccagggcggcatcaccgacaacgggatcatctgttccggcgatccgcagtccgaccagttcgtcatcaccgcgccggccgacctcgatgtcgcgctgctgtacaagacccggtcgccgagcggtgccatcgacctggtcgtctacgacatgcactacggcgatgccgaggcagcggtttcatgggtgggtcagattggcgatgtggactggccgaccgtggatagctgccgcataacgtgcgtgtcggaagatgagctgatggatcagcccggcttgatcgacacctactgccgcacctgcacggcagtcgttggcgaccatcgctgcaaggtcaacctcgttccgtatcgcgtgacgctgacgccgcagagcatcagcggctgggtgatctccagcggcgtggtcgccggctatgccgatggctggtttaccgggggctatgtcgagtggcaagtggacggcgacaactacgatagccgctacatcgagcggcacgccggacccgatctttacatcctgggcggcaccgagggcattccggcaggtggccaactgcgggtttatccgggttgcgacgggctcgcgcagacctgcgacgacaaattcagcaacctccccaacttcagggggtttaacgcgatgcaaggcaagtcgccgttcgatggcgaccaggtctggtgaggtaggcaatggacccgatcacaatcaacctcgtcatcctggcggcgtcgttcatcctatccaaggtcttggcgccgaagccgcagaagcccaagccgaccgcctttgaagacatcgatttcccgcgctgtgacgagggcgacgaacaggtcgccgtcttcggtcagtgctggtcgaagagctggatggtgctgaccgtgggcaactaccgaacgaaggcgatcaagaccaaagggagcaagaaatgatcgttacggctcagcacctgcataccgtgccgacctggaccactcggcagggttactgccaccggcaggcgcgggacttcttcaagcgccatggactggattggatgactttcctacgggacggcatcgaggccgacgtgctggtcgcgaccggcgacgcgctcgcgctcaaattggttgaacatgcacgccaggagatcgcgaatgggcgctaaaccgaaggcacagacggtcgggttccgctactacttcgacatccatttcgctctgggcaagaaagtcgatgaagtttgtgcaatccgggcgagtggcaaaaccgcgtggaaagggtcgatcaccagcaacggacaggtccgcatcaatgcgcctgagctgttcggtggtgacaagggcgaaggcggcctcgacggaacgctcgatgttctgtttggcgaagaggaccagggcgtccttccgcgcttggcggccatgctcggcggtctggtgccggcgttccgtggcgtaaccactgggttctattccggcctggtcaccgcgatgaacccctacccgaagacctgggaaattctgcgtcgaggcgggaaccgcctgtgggacggcaacccctggtatcccgaaaagcaatttatctggctcgcggacggtcagatcaaagcgatgaacccggcgcacatcctttatctcgtctacaccggccgggacttccgggggctggcccgcacgcggatggacgaggcgagctggcgggtcgctgccgacaagctgtatgccgagggtttcgggctgtgctttgaatggaccaggtccgacacgttcgccaacttctgcgagacggtgaaatcgcatatcggagccgaggtctacccgaaccgccagactgggcagatcagcatccggctcctgcgtgacgactacaacgttgctgacctgccgctgttcgacgaagacagcggcctcctggagatcacccaggagaagaccggctcgacgtcgctcgcgccgagccagcttatcgtgaagtacatcgaccagaccgacggtgcgcagcgccaagtcatcgtcaacaacaacgcggtcgccgcgtcgcaggggcggcggtcgtccgaggaagtcgagttcctgggcgtgccgactggcgagctggccgggcgagtcggtgagcgggaaatgcgtctgaagaccaccggcctgaagcgctataagggcgtattcgaccgccgtgcccgtagcctgaacccaggccagccgttccgcatccgttcgacccggcgcggcatccctgaaaccgtcgtccgggtcggccggatcgaggacaacttcctcggcgacggcaagatcaccctgaccgtcgtccaggaccagttcaatctgccggcgactaccggcgtggcaccaccgccaccgggctggaccccgcccgaccggacgcctcgggcggtcaccgtgcggcgtctgatcgaggcgccatatcgcgagctggccggcgtgatcgatccggcgaatctccagctcctggacgtgagcgcgtcctacctggccgcgctggccgaggcgccgaccagcctgtcgcagagctacacactgaccgaccgcgtcggcagctctggcgcgttcgttgatcgcggaaccggcgactggtgcccgaccggactactcgccgccgagctgccgctggcggccggcccgagcgtggtcacgctgacgaacgccagtcggctggaggacgtcactgtcggccaggcggctgcggtggacgacgagatagtccgggtcgatgcggtcaactacgccagcggcgcggtcaccctcgcgcgcggctgcgccgataccgtaccagccaagcatctggccggggctcgggtctggttctacgacacgttcgaagcggtggacgagacggtatacagccagggcgtgacgctccaggcccggctgctgaccaacaccagcgagggccagctcgccccggcgctggccgccaccgacagcctcactctgaccgggcgccagggcaagccgtatccgcccggccagttccgaatcaacggcagcgcgtacccgacgaaggtctacggggcgctgtcggtgagctgggcgaagcgcgaccgcatcggccaggccgaccagttgatcgataccactgtcggcaacatcgggcccgaagatggggcgacggtgacgctccaggtctacagcggcacgacgctgaagcgcacctatgccggcctcacatccagtaactggtcctatccgctggccgaagacgtcgctgacggcccgctccaggacgtgcgcctggtcctgcgcagcgtccgcgacggcatccaatcctggcagcaacacgacatcaccatcgaacgacacggcctgggcttccgcttgggcgaagaccttggaggcgtttccgcatgactctctatatggggcctaacaccggcctgctgatcaacggcttgccgggagaagggcattacagcgatctgattcggatgtggcgctgggatgactttctgaggcagccggtcgtcaaggggcgcgtcgccgcgctcccgaccagcggccaggccgagggggacacgtacattttcactggctccggctccaatcagaaccgcctagcgcgctggtgggcaacgggcgccaccacggcaatttgggagtacatgccgccacggctgggctggcgtgtccaggtcgcaaacgagacgacgccgagcggccaggtcaagacctacgagtattccggcacggcgtgggtcgagctggtgggcggtatgtcggacgcgcccagcgacggcagcaactacgcacgcaacaacgggacgtgggggaagctgggaaccgctgccggagcagacctcaacggcatgccgttcctcaatctgatgcccgatagcgggcggtacgcaggcagtatcaacccgctaatcctgcgattcactgaggctttttccagtacgttcctgacgccatggaatggcgcgtcaatcgctgacggcggaaagtacatctacgacaacaccacaaacggcgggacggctggcaatctgaatcaacgtgtccaggacttactggtggcgatggggcggtccagtggcagcttggcgcgctatggcgtggagttctataccgctgtgctgaccgctggccccaacgcaacgaccggctctacgggcgccgacggcacgacccgttatctccagatgacgaactcgtcgagggcgctcttcatcgccaacggctggtgtactgcggttctttggatacgcgcggaggccggatcgcttcacttcatgccggcaacggccccgacgactgactacaagatatggctgaatggtgcgcctgtactgccggggcaggtgctgaccccggccgatggatggaagcacgtcaggatttccaaaaagagcgcgcagggctacgacaacggcttcccgttcctctatatgtcgctgggcgccagtgcagctatggcctgtccggcattcttcggcggcttggtcgatcccggcatccacgtcgcgcctattgcaaccgtcaactcacagagcgcatgacaatgacgaaacgagttctattgaaaggcgagttcttcgcagagtgggccggctcgctggacgaggccgccgcactcgctggcgtcccggtcggcgacctggcgttccatcccgacgacctcctggccgaagtccaggagttacgccgccaggcctatcgcaccgagtccgacccgctgcgcctggaggccgagtttgacgccatagccgctggcaccgagccggacctggaggcatgggtcgcggccgtgcaggcgatcaaagaacgctatccgctcccccagtcctaagcgttttgataattgtgaccaacgtcgcctttttgctacggtccctagctgatgtgcggagtagatagggatgttggtatggacgaggtgcttagacggaggctgcgggcggagctgctggaggtggggtttctcaaccagtgctgccttgatctgatggaagcgatggaggccgagttcagcctcaccgaggaccagcgcgaatgcatcgagcagctcggccgattcctgcgggagggcatcggcaagctgaccgctctgtctgagcgggtagccgatggcgatatcgtcgtgctgtgctgatcttttgaaattcttttgccgctggcgaaacggttagggcgcgtcatttattgcgcaaatccgcgccaaatttcgcgccgcgctacattttcccgccgtgtaggcagccaggaaattgcgagcgatagagacccgtagggcggataccgccacaggcggtatccgccgaaaccccggataagcggcggataaccgcaagcggtgattcgccctacaaccaggctccggcatacggggacgtgaccgcagcttcactgtctcagagattgaccaggcgcatgccttcctcgctatagcgactgccggcgaccgcctcggcggggaagatcgcatccagctcggccagttccgccgcgctcaggcgcaattccgtcgcggcgacgttctcctccaggtagcgccgctgcttggtgccgggaatcgggatcaggtcatcgccctgcgccagcacccaggccagcgccagttgcgagggtttcacgcccttggctgcggccagttcgccgaccttgtccaccagcttcaggttcttcgcgaagttctcgccctggaagcgcgggctgaaacgacggtagtcgtcggcggcgaagtcttccgggcgcttcagggtgccggtaaggaagcctcgacccagcgggctgtaggggacgaaggcgatgcccaggcgacggcaggcggcgagcaccccggtgtcctccggatcgcgggtccacagcgagtactcgctctgcaacgcgctgatcgggtgcacccggtgggcacgctcgagggtttccgccgaggcttcgctgagaccgatgtggcggatcttgccggccttcaccaggtcggcgagggcgccgacgctgtcctcgatgggtacctgcgggtccatgcggtgctgatagtacaggtccaggcggtcggtaccgaggcgcttcaggctgccttcgatggcgcggcggatgtacgccgggctgccgtcgacgccgcgcgcccggggattggcagggtcgcggacgatgccgaacttgctggccaggaacacctgctcgcgtttgccgcgcagggcctcgccgagcagttcctcgttactgtgcgggccgtacatgtcggcggtatcgaagaagttcagcccgagttccacggcgcgatgcagggtggcgatggcctcctggcggtcgccgccggtggtgtagaagtcggtcatgcccatgcagccgaggccaatggcggagacggaagggccgttgtggccgagttgacgggttttcatgtgtcgagcctcgcgggagggaaggaaaacgtcgtcattcttcgctctgcattggtctggataaagcccataattacggttttaccattcgtattttccaaataatcgagggtgtccgatggatcgtttccaggccatgcaggccttcacccgcatcgtcgagctgggcgccttcggcaaggccgcggacagcctggagctgccgcgcgccagcgtgacccaggcgatccagcaactggaggcgcaccttggcgtgcagttgctgcagcgcaccacccgccaggtcagcctgaccctcgacgggcaggcctactacgagcgttgcgtgcgcctgctggcggacctggaggaggcggaaagctgctttccacgcgtcctgaacaacccgcgcgggcgcttgcgggtcgacctgccgggcgcgctggggcggatgcgggtgattccgttcctgccggagttctgcgagcgctacccggaactggagctgcagttgagcagcaacgatcgcctggtcgacctgctgcgcgagggtgcggactgcgtgctgcgggtcggcgagctgcacgattccagcctggtcggccggcacctggccgacctgccgcaggtgacctgcgccagcgccgcctacctggagcgtcatggccatccgcggcagctcgccgagctcggcgggcacctcgcggtgaactaccagtcgccttccagcgggcgtaccttcgacttcgagttcagcgtcgacgggcgtctgcgcacgttgccgatgcgcagccgggtcagcgtcaacaacgccgatgcctacgtcgccgcctgccgggccgggctcgggctgatccaggcgccgcactatcacgtcgccgccggcctggccgacggtagcctccgacaagtgctcggagaatggttgccgccatcgctgccgctgcatgccgtgtatccctcgcagcgccagttgtcgccgcgggtgagggtgttcgtcgactggctggtggaactgttcggtcgccaggcggccggcgagacgcaatgagacgcaggctttccgggcgaagatttttctcgatttcgccgagagaacctcgttaggatcggcagccttggcctgtcgagcagggatgttcgtccgagttccggatgcccgctgccgccaggccgcattcattcgaacaagaataaggatcgctgatggaaagcttgcagaagtgggtggtcgacctgaacggcgtggtctgggggccgttgatgctggtgctgattctcggcaccggcctgtacctgatgctggggttgaagttcatgcccctggtgcgcctgggagtcggctttcgcctgctctggcaggggcgtagcaaggatgacgagagcagcggcgagatcagcccgttccaggcgctgatgacctgcctggcggccaccgtcggtaccggcaacatcgccggggtggccacggcgatcttcctcggcggcccgggcgcgctgttctggatgtggtgcaccgcgctggtgggaatggccaccaagttctccgaagtggtgctggcggtgcactaccgcgagaaggatgagcgcaacgaacacgtcggcggtccgatgtatgccatcaagaacggtctgggcaagcgctgggcctggctcggcgcggccttcgcgctgttcggcgggctcgccggcttcggtatcggcaacatggtccaggtcaacagcatggccgatgccctggaggtttccttcggcgtgcccgactgggtcaccggggtcgccaccatgctcgtcaccgggctggtgatccttggtggcatccgccgtatcggcaaggtcgccgaagccctggtgcccttcatgtgcgtcggctacatcgtcgcctcggtgatcgtcctggtggtccatgccgaggcgattcccggcgcgttccaactgatcttcacccacgccttcacgccgatcgccgccaccggcggcttcgccggcgcagcggtgatggcggcaatccgtttcggcgtcgcacgcgggatcttctccaacgaggccggcctcggcaccgccggcatcgcccaggccgccggcacgacccatagcgcggtgcgttcgggcctgatcggtatgctcggcaccttcatcgataccctgatcatctgcagcctgaccggcctggcgatcatcacctcgggcgtctggaccagcggcgccagcggcgcggcgctgtcctcggcggcgttcgaggcggcgatgccgggcgtcggccactacatcctgtcgctggccctggtggtgttcgcctataccaccatcctcggctggagctactacggcgagcgctgctgggagtacctggcgggcacccgggcgatcctgccgttccggatcgtctggaccctggcgattccgttcggcgccatgacccagctggacttcgcctggctggtggcggataccctcaacgcgctgatggcgattcccaacctgatcgccttgctgctgctgagtccggtggtgttccgcctgacccgggagtatttcgccaaggccaggagttgagcctcgggggacggcgacgctcaaacccgaggttttcgctcgggtaaagcgtgctagcatcgtcgccggccccgaatgcttccgccgccggccacagggccggcggcttctcactgactagaaggatcaacgcaatggctcaagtgactctcaagggcaacccggtcaacgtcgatggccagctcccgcagaaaggcgcccaggctccggccttcagcctggtcggcggcgacctcgccgacgtgaccctggaaaacttcgccggcaagcgcaaggtgctgaacatcttccccagcgtcgacaccccgacctgcgccacctcggtgcgcaagttcaacgtcgaggccggcaagctggccaacaccgtggtgctgtgcatctccgccgacctgccgttcgcgcagaagcgcttctgcggcgccgaaggcctggagaacgtagtcaacctgtcgaccctgcgcggtcgcgagttcctcgagaactatggcgtggccatcgccagcggcccgctggccggcctggccgcgcgcgccgtggtggtgctcgacgagcagaacaaggtgctgcacagcgaactggtcggcgaaatcgccgacgagccgaactacgcggcggccctggcggctctctgagccccacggccaacccgcttcgtcccatgactgtcagccaggctggctggtaacgggcgaacccgaatcccttggctgctcgcttcgggccatgagcagggcggataatcgcggcgcggtcatccgccctgcgtcgtagagacgcagcgctagcgcatggcgacctggtggcgccggctgacgctggcgaaggcgctccggaacgcctgcatctcttcctcgctgcctaccgtcacgcggacccagttgggccaggaggcccacgggcggccaacgtgcacccgctgtttctccagttcggcgatgaccagctcggcgggacggcgcatatccaccatgaaacagttggactgcgaggcggtgcagcggaagccctgctggcgcagccaggcgatggtgcgctcgcggacctctgcgttctgctgcttgcgccgtggcaccagatcgtcgtcacgcaggctttccagcccggcgtgggcggtcggcgagggcaccacgttgtggccgccgaagcgctccagccgcgccagcagctgcggatgcccgatggccaggccgagccgggcgccggccatcccgtagagtttcgagaaggtacgcaggaccagcacatcctggcgctggacggccaggccgacgacgctgggtgcgtcggaaaaatggatatacgcctcgtcgaccagcaccacgctgcgctcgggcttgcgttcgatcgccctgacgatccgctggtgcggggtgagggtgccggtcgggttgttcgggttgcagatatagatcagcccggcgtcgcgttgcgcggcggcgagcatgcgctcgatgtcgtgggccgcctcggcgtccagcggcacggcagcgaccttcgccccctgggcctgggcggcgccaaccacggagtcgtaggagggatcggcgatgaccaggccgcgctccttgccggtgaacgccgcgacggcgtattgcagcggctggcgcgagccgcagtaggcgtgcacgcattcggcggggatgccgttctgcttggcgaacaggccgaccagggcgtcctgcgcgtcgtagtcgtagcgaccgcagagcgcggccgcccgctgcatggcggccctggccttggcggaggggccgtaggggctttcgttgaaatccaggaaggtctcttgcggcttgccggcggcgcttgtcgcgccgctcccggcgaaggctcgcgggctcagcaggatgctgctggaggccagggcggtcagggtcacgaacgaacgacgactcaaagcgggcatagcttcacctccgtgtaccgaatgggatatgcgtgcggtgggttcctctcgggcgtgtgtcaccagagtggataacgaggagggagtcggtccgtttatggtggcgtgataatggcgccggaatatcggcggtcgttcttcggattgcgcacgcggcgctcccgggcggcgaaccgccggggagcgccgtgtggattcagagcgtgagggtgaagcgcccggtcagcgcgcccggcaggtgcatcgagtcggtctggcgttcgccgtaggtattgctggacaggcgcagttcgcgctcgtggctgaggtcttccaggtgggcgccgaggaagctgtacaggctgtcgtcgaagcgcatggtgctgaccggcgcccggatctggccgttctccacccagaaggtggcgaagcgggtcattccggtcaggcgtgcggcgggcatgtccgagtagttcaggtaccacaggttgccgatgtacaggccggtatccagggcctcgaggatgcgcgcctgttccaggctgccgccggccatgtccagcgccgtgggcgcctcgttggcgccggcgccattggctaccaggccgtattcgcgggcgctgcgcgaactcaccaggcgtccgctcaggcggccgttgccgaccagttcgacctcggcgcgcggcgagccttccgcgctgaatgccggggagggcgaggtggcagggcgctcggcgaggttcagcagcgggctgagcagggcgtcgccgttctgcaggcgttgcagggggctttcgccggtagccagggcgcgcgcggagaaaccgccccagcagagcatctgcatgacttcctcgagcgccgccggcgccaggtaggcgcgatagtcgccggggcgcaactggcgcagcggcttgcccaggtggccgagctgctcccgggcctgttcgaagcgccgggcgaaggcttcgtcgtcccagcgctggccggcgtagtcggccttcaccgcctggccgttgccatggaacaggctccagtcgaagttgaagctgctgccggcatgccagccgaaggcgccccaggagttggcgaagccacggaacagcggtccggcggcatagatgccgaccaggtcgaggtcgcgcgcccggcgttcgaggctggccagcagcgcgccgctgtcgggcgctgcgccgaggtcctggttctctcgctgccaggccgaggtgtcgagcagcagatagggatcggcgggaatccaggccaggctctggcgcagttgccgaaggccttcggccagacgctggcggtcttcttccggcgcgcgggagagcgtcaggtcgaggctcgcctggcgttcgtcgcgaatcagccggagcagcgcgttggcctggcgcacccggccggcctggcgcacccgcgcccggttgaagcggatgaactcggagtcctcggcgctgtaccagagggtgaagtcctcgccctcggccagatgccggcgcaggtcctcggcgagggcttcgaaatgctgtctctggtgcatcaggtatctcccccgaatacgtccacatcgctgaatacgcaggccggcgaggcgtggccgacacggatcacctggttcggctcgcccttgccgcagtagggcgtgccgagcacctcgaaggtgccggcgtcgcccaccgcgctgaggttgcgccagaactgcgcggagatgccccggtagttggggttcttcaccacgcccttgagttcgccgtcctcgatcaactggccccattcgcagccgaactggaacttgttgcgtgcgtcgtcgatcgaccaggagcggttgtaggacatcagcaccccgcgctcgataccggccaccagctgcgcgaagctcttgtcgccgggctccaggttgagattggccatgcggtcgatgggcgcgcggttccaactgctggcgcggctgttggcgacgccctccaggccgctgcggtgttgcgacagggcgccgccgagcggacgcagcaggcggccttcgcggatcaggtattccttgcgcgcggggctgccgtcgtcgtcctggcggtagctggccagctcctcggggatttccgggtcgaagctgacgttgagcaggctggagccgtactggtagcgaccgaagtcctcggtcttgatgaagctggtaccggcgtagttgcgctcgtcgccgaggatgcgatccagctccagcgggtggccgatcgactcgtggatctgcaggatcatctggtccggcatcagcagcaggtcgcagcggccgctcggggtgttcggcgccgccagcagttgcagggcctggtcggcgatgcgcggcgcggcgccgaccaggccgaggcgctcgatcacttcggcgccgccctgctggccggcatggtggccgccgaaactgcgggtctggctgtcatggccgtcgtaggcggtgacgctggcgccgggatagacgaagcgctgctcgtggtattgctcggcgccggcgctgttcaggtagagctgttcctggcggctgacttcgaggaatacgctccagttcaccaggcgctcgtcgcgcggcaccttggcggattcctcggcgagcagttcgtagcactcggcgagggaggggaaaggggcgtcctggttcggcgagcgatactgcgagcggccgcttgccggcggcaatccgcggacgtcgaacagggcgtgccgggcgatccgctcggcttgccgttcggcctgctccagggcggcctgcaggccggccgcggagagatcgttggtggcggcgtaggcttccacgccgttcagccgtacgcagagcatggcgccgcggtcctggctgaagtgcggcggttcgctgacgttgcggcgcaccgagaggtactcgccgctacgctggacgtagcgcaaggagtggaattcggcgcgactgcggagcgccgcgaagcggtgtttcaacgggtcgatcatctgtgcgtccctggccgattgcggagtgggcgaatgcagaacgctctatttcaagccttcgtccgtaacggagcaagccgtttgttgtcatagcctggtgccaggctgcgggtagctcgccgaagcatgcgggcggaatgcctaactatcggtaaagcaagggtaaatagcgggtaaagaggctttgcctgggcccctgcaatgcttatcgtgcagcctggaaaaagcgcctccgttctaagcctgaagaagaaccatgactccaacgaccggtaaatccaagttccgtaccctgcgcccgtggctgatcaccgccctggccttcgccgccgtgatcggcctggtgatgtggctggcggcgcccgcctcggcaccgtcctccgacgggcgacccggtcgcggcggcaagccgggcgccgcgctgcccaaggccaacgcgctcaccgtcggcgtggccagggtggagcagggcgacctggcgctgcatttcaacgcgcttggcaccgtcaccgccttcaacacggtgaacgtcaagccgcgggtcaacggcgagctggtcaaggtgctgttccaggaggggcaggaggtcaaggccggcgacctgctggcggtggtcgacccgcgcacctacaaggcggcgctggcccaggccgagggcacgctgatgcagaaccaggcgcaacttaagaacgccgagatcgacctgcagcgctacaaggggctgtatgccgaggactcgatcgccaagcagaccctggatacccaggaagcccaggtccgccagttgcagggcaccatccgtaccaaccagggccaggtcgacgacgcccgcctcaacctgaccttcaccgaggtccgcgcaccgatttccgggcgcctcggcctacgccaggtggacatcggcaacctggtcaccagcggcgataccacgccgctggtggtgatcacccaggtcaagccgatctcggtggtgttcagcctgccgcagcagcagatcggcaccgtcgtcgagcagatgaacggccccggcaagctgacggtcaccgcgctggaccgcaaccaggacaaggttctcgccgaaggcaccctgaccaccctggacaaccagatcgacaccaccaccggcacggtcaagctcaaggcgcgcttcgagaacgccgacggcaagctgttccccaaccagttcgtcaacgtgcgcctgctggcgcagaccctcaagggcgtgctgaccattccggccaacgccgtgcagcgcggcaccaacggtatctatgtgtacgtggtcggcgccgacaacaaggtcagccagcgcagcgtcgccatcggcaccagcgagaacgagcgggtggtggtggaaagcggcctgaaggccggcgagcaggtggtggtggaaggcaccgaccgcctgcgcgacggtatggaagtgcgtgtcgccgaggcctccccgcaggtcctcgagggcgagccgcagaaaccgcagactggccgccccagcggcctccagggcgactcggtgggtagcgggagcgctgaatgaacccctcccgcccgttcatcctgcggccggtcgcgaccaccctgctgatggtggcgatcctgctctcgggcctgatcgcctaccgcttcctgccgatctcggcgttgccggaagtggactacccgaccatccaggtggtcaccctgtaccccggcgccagcccggagatcatgacctcgtcgatcaccgcgccgctggagaaccagctcgggcagattccggggctcaacgagatgtcttccagcagttccggcggcgcctcggtgatcaccctgcaattcagcctgcagagcaacctcgatgtcgccgagcaggaagtccaggcggcgatcaacgccgcgcagagcctgctgcccaacgacctgccgaaccagccggtgttcagcaaggtgaatccggcggacgcgccgatcctgaccctggcggtgatgtccgacggcatgccgctgccgcagatccaggacctggtggatacccgcctggcacagaagatctcgcagatctccggggtcggcctggtcagcatcagcggcggccagcgcccggcggtgcgggtgcgcgccaacccgacggcgctggcggcggcggggctgagcctggaggacctgcgcagcacggtgaccagcaacaacctcaacggccccaagggcagcttcgacggcccgacccgtgcctcgaccctggacgccaacgaccagttgcgctcggccgacgcctaccgcgacctgatcatcgcctacaagaacggctcgccgctgcgcatccgcgacgtcgccagcgtcgaggacgacgccgagaacgtgcgcctggccgcctgggccaacaacctgccggcggtggtgctgaacatccagcgccagccgggggccaacgtgatcgaggtggtcgaccggatcaaggcgctgctgccgcagctgcaatcgaccctgccgggcaatctcgacgtgcaggtgctgaccgaccgcaccaccaccatccgcgcctcggtcaaggacgtgcagttcgagctggcgctggcggtggcgctggtggtgatggtcaccttcctgttcctgcgcaacgtctacgccaccctgattcccagcttcgccgtgccgctgtcgctgatcggcaccttcggcgtgatgtacctgtccggcttctcgatcaacaacctgaccctgatggcgctgaccatcgccaccggcttcgtggtcgacgacgcgatcgtcatggtggagaacatcgcccgctacctggagcagggcgactcgccgctggaagcggcgctcaagggctcgaagcagatcggcttcaccatcatctcgctgaccttctcgctgatcgccgtgctgatcccgctgctgttcatgggcgacgtcgccgggcggctgttccgcgagttcgccatcaccctggcggtggcgatcctgatttccggcttcgtctccctgacccttacgccgatgctcagcgccaagctgctgcgccacatcgacgaggaccagcagggccgcttcgcgcgcgccgcggggcgggtcatcgatggcctgatcgcacagtacgccaaggccctgcgggtggtcctgcggcaccagccgctgaccctgctggtggccatcgccaccctggcgctgaccgcgctgctctacctggccatgcccaagggcttcttcccggtgcaggacaccggggtgatccagggcgtcgccgaagcgccgcagtcgatctccttccaggccatgtccgagcgccagcgcgcccttgccgaggtggtgctgaaggacccggcggtggccagcctgtcctcctacatcggcgtcgacggcagcaacccgaccctcaacaccggccgcctgctgatcaacctcaagccgcacagcgagcgcgacgtcaccgccagcgaagtgatccagcgcctgcagcccgaactcgaccacctgcccgggatcaagctgtacatgcagccggtgcaggacctgaccatcgaggaccgggtcgcccgcacccagtaccagttcaccttgcaggacgccgacccggacgtgctcgccgagtgggtgccgaagctggtggcgcggctgcaggagttgccgcagctcgccgacgtcgccagcgactggcaggacaagggcttgcaggcctacctgaacatcgaccgcgacaccgcctcgcgcctcggcgtgaagctctccgacatcgacagcgtgctctacaacgccttcggccagcggctgatctcgaccatcttcacccaggccacccagtaccgcgtggtgctggaggtggcgccgcagttccagctcggcccgcaggccctggagcagctctacgtgccgtccagcgacggcacccaggtgcgcctgtcgagcctggcgaaggtggaggagcggcataccctgctggcgatcaaccatatcgcccagttcccctcggcgaccctgtcgttcaacctggccaagggttactccctgggcgaggcggtcgaggcgatccgtggcgtcgaggccagcctggagctgccgctgagcatgcagggcagcttccgcggcgcggcgctggccttcgaggcctcgctgtcgaacacgctgctgctgatcctcgcctcggtggtgaccatgtacatcgtcctgggcatcctctacgagagcttcatccatccggtgaccatcctctcgaccctgccctcggccggggtcggcgcgctgctggcgctgatgctggcggggcaggagatcggcatcgtggcgatcatcggcatcatcctgcttatcggcatcgtcaagaagaacgcgatcatgatgatcgacttcgccctcgacgccgagcgcaacgaaggcaagccgccccatgaggcgatctaccaggcctgcctgctgcgcttccggccgatcctgatgaccaccatggccgcgctgctcggcgcgctgccgctgatgctcgccggcggcgccggcgccgagctgcgccagccgctgggcatcaccatggtcggtggcctgctgctgagccaggtcctgaccctgttcaccaccccggtgatctatctctacttcgaccgcctggcccgtcgctgggcggcctggcgcaagcagcgcgggctggacctgaacaccgaggccgggttcgacggggacgccgggcgatgagtctgtccacgcccttcatccgccgcccggtcgccaccacgctgctgaccctggcgttgctgctggccggcaccctgtcgttcggcctgctgccggtggcgccgctgcccaacgtcgattttccggccatcgtggtcagcgccagcctgccgggcgccagcccggaaaccatggcctcgtcggtggccacgccgctggagcgctcgctgggacggatcgccgggatcagcgagatgacctccagcagttcgctgggctcgaccaccgtggtgctcgtgttcgacctggagaaggacatcgacggcgccgcccgcgaggtgcaggcggcgatcaacggcgcgatgagcctgctgcccagcggtatgccgaacaatcccagctaccgcaaggccaacccctcggacatgccgatcatggtcctcaccctgacctcggagacccagagtcgcggcgagatgtacgacctcgcctcgaccgtgctggcgcccaagctgtcgcaggtgcagggggtagggcaggtgagcatcggcggcagctcgctgccggcggtgcgggtcgacctcaacccggatgccatgagccagtacgggctgtccctggacagcgtgcgcacggccatcgccgcggccaacagcaacggccccaagggcgccgtcgagaaggacgacaagcactggcaggtggacgccaacgaccagttgcgcaaggcccgcgagtacgagccgctggtgatccactacaacgccgacaacggcgccgcggtgcgcctcggcgacgtggccaaggtcagcgactcggtggaggacgtgcgcaacgccggcttttccgacgatctgccggcggtgctgctgatcgtcacccgccagcccggcgccaacatcatcgaggccaccgacgccatccacgcgcaactgccggtgttgcaggaactgctcgggccgcaggtcaagctgaacgtgatggacgatcgcagcccgtcgatccgtgcgtcgctggaagaggccgagctgaccctgctgatctcggtggcgctggtgatcctggtggtcttcctgttcctgcgcaacggccgcgccacgctgatccccagcctggcggtgccggtctcgctgatcggcaccttcgcggtcatgtacctgtgcgacttcagcctgaacaacctgtcgctgatggcgctgatcatcgccaccggcttcgtggtggacgacgccatcgtggtggtggagaacatcgcccgacgcatcgaggagggcgatccgccgatccaggcggcgatcaccggcgcccgccaggtcggtttcaccgtgctgtcgatgacgctctcgctggtcgcggtgttcatcccgctgctgctcatgggcggcctcaccggacggctgttccgcgagttcgcggtgactctctcggcggcgatcctggtgtccctggtggtatccctgaccctcacgccgatgctctgcgcgcgtctgctgcgtccgctgaaacggcccgaaggcgcttccctggcgcggcgcagcgatcgcttcttcgccgccttcatgctgcgctaccgcgccagcctgggctgggcgctggagcactcgcggctgatggtggtgatcatgctggcctgcatcgccatgaacctctggttgttcgtggtggtgcccaagggcttcctcccgcagcaggactccgggcgcctgcgcggctacgcggtggccgaccagagcatctcgttccagtccctgagcgcgaagatgggcgagtaccgcaagatcctctcttccgatccggcggtggaaaacgtggtcggcttcatcggcggcggccgctggcagtcgagcaacaccggttcgttcttcgtcaccctcaagccgatcggcgaacgcgacccggtggagaaggtcctcacccggctgcgcgagcggatcgccaaggtgcccggcgcggcgctctatctcaatgccggccaggacgtgcgcctgggcggccgcgacagcaacgcgcagtacgaattcaccctgcgcagcgacgacctgaccctgctccgcgaatgggcgccgaaggtcgaggcggcgatgcgcaagctgccgcagctggtggacgtcaacagcgactcccaggacaagggcgtgcagacccgcctggtgatcgaccgcgaccgcgcggcgaccctggggatcaacgtggaaatggtcgacgcggtgctcaacgactctttcggccagcgccaggtgtcgaccatcttcaacccgctgaaccagtaccgggtggtgatggaggtcgaccagcagtaccagcagagcccggagatcctccgccaggtccaggtgatcggcaacgacggccagcgcgtgccgctgtccgcgttcagccactacgaaccgagccgggcaccgctggaggtcaaccaccagggccagttcgccgccaccacgctgtccttcaacctggcaccgggcgcgcagatcggcccgacccgcgaggccatcatgcaggccctggagccgctgcacatcccggtggacgtgcagaccagcttcgagggcaacgccggcgcggtgcaggacacgcagaaccagatgccctggctgatcctcctggcgctgctggcggtgtacatcgtcctcggcatcctctacgagagctatgtgcacccgctgaccatcctctcgaccctgccttcggccggggtcggcgcgctgctcgcgctgatcctctgccgcagcgagctgagcctgatcgcgctgatcggcatcatcctgctgatcggcatcgtcaagaagaacgcgatcatgatgatcgacttcgccctggaggccgagcgcaaccacggcctgagcccgcgcgaggcgatcctcgaggcctgcatgatgcgcttccggccgatcatgatgaccaccctggccgccttgctcggcgccttgccgctgatcttcggcatcggcggcgacgccgcgctgcgccggccgctgggcatcaccatcgtcggcgggctgatcggcagccagttgctgaccctgtacaccaccccggtggtctacctctatctcgaccgcctgcgccactgggtcaaccagaaacgcggcgtacgcacggacggtgcgctggagacacccctatgaaacacaccccctcgttgctcgccctggccctggtcgccgccctcggcggctgcgccatcggccccgactaccagcgaccggacctggcggtgcccgccgaattcaaggaagccgaaggctggcgccgcgccgagccgcgcgacgtgttccagcgcggcgcctggtgggagctgtacggcgaccagaccctgaacgacctgcagatgcacctggaacgttccaaccagaccctggcccagtcggtggcgcagttccgccaggccgaggcgctggtgcgcggcgcgcgggcggcgttcttcccgtcgatcaccggcaacgcgggcaagacccgcagcggccagggcggcggcgatagcaccgtgttgctgccgggaggctcgacggtgagcagcggcggctctggcgcgatcagcaccagctactcgaccaacctcagtgtcagctgggaggtcgacctctggggcaagctgcgccggcaactggaggccaaccaggcgagcctgcatgccagcgccgccgacctcgccgcggtgcgcctcagccagcagtcgcaactggcgcagaactacctgcaactgcgggtgatggacgaacagatccgcctgctcaacgacacggtgacggcctacgagcgttcgctgaaggtggccgagaacaaataccgcgccggcatcgtcaccagggccgacgtggcccaggcccgcacccagctgaaaagcacccaggcccaggccatcgacctgaagtaccagcgtgcccagctggagcacgccatcgccgtgctggtcggcctgccgccggcgcaattcaacctgccgccggtggcgagcgtgccgaagctgccggacctgccggcagtggtgccgtcgcaattgctcgaacgacggccggacatcgcctcggcggaacgcaaggtgatttccgccaatgcccagatcggcgtggccaaggccgcctatttccccgacctcaccctgagcgccgccggcggctaccgcagcggcagcctgagcaactggatcagcacgccgaaccgcttctggtcgatcggcccgcagttcgccatgaccctgttcgacggcggcctgatcggctcccaggtggaccaggccgaggcgacctacgaccagaccgtggcgacctaccggcagaccgtgctcgacggtttccgcgaggtggaggactacctggtgcaattgagcgtcctcgacgaggagagcggggtgcagcgcgaagccctggagtcggcccgcgaggcactgcgcctggccgagaaccagtacaaggccggcaccgtcgactacaccgacgtggtcaccaaccaggccaccgcgctgagcaacgaacgcaccgtgctgaccctgctcggcagccgcctgaccgccagcgtccagttgatcgcggcaatgggcggcggctgggacagcgccgacatcgagcggaccgacgagcggctcggccgggtcgaggagggcctgtcgccttcgccctgagttcttctcgctgcctgttcctgacgaatgcctttccccgctattgcgcttgcatgacacaccgccgtccgcgtctcggctagagtgcggcggcggatgtggaggtgaatacgtgtcggggaagtttccggaaaagccctcgcgccgaggctactggctcggctggttgtgccgcctggccatgcttggcggcgtcgccgcgatgttctgggcgctgctgcaatgcttcgtcctgctgcacggtgaaccgccgctccagcgcgccccgctgcggacgccctggaccctgctggcgctcggcctggcgctgttcctcgccggtttctgcggcgagtaccggctgtggcggcgccgcgccggttgctgaaaccggcgtcaggcagcgcccgtcgaagggaacagcaggcgcaggtgggtcttctgctgcggtacgctttccgcttcggcgcggccgccgtggtaggccatgatcgattgcacgatggccagtcccaggccggtgccggcctgggctccagtctggcgtccggcgcggcggtagaagcgctcgaacaggtgcggcaggtactccggcgggatgcccgggccgtcgttgctgaccctcacctcggtgtgccccgcgcgttccccgatccgcacgtcgatgcgcccgccttgcggggtgtggcgcacggcgttggacaccaggttggaaatggcgcgctggatcatcaggttgtcgccgtgggcgaagccgttgccggacaggcgcagttcgacgcccttgtcctcggcgaccatctcgtacaggtcgatgaccttggccgcctgctcgtgcagggcgacgcagccgaactgggcctggatcgccgggttgtccacctgcaccaggaacagcatgtcggtgacgatccgcgacagccgctccagttcctcggcattgtactccagggcttcgcggtatgccgcgccgtcgcgatgctggctgagcagcacctggttgcgcaccagcaggttgcagatcggcgcgcgcagttcgtgggccaggtcgtcggagaactgcgagagctggcgtacgccatcctcgaggcggccgagcatgtggttgaagctgcgggccaggctgtccagctcgcgcggcaggttctgctcggggatgcggtaggagagatcctgcgggctgacctgggcggccacccggcggaagcggttcaacggttcgaggccggcacgcaccacccaccaggcggccagggcgatcaatggcaggaggaagggcagggccagcagggtggcgcggaggaaaccgtcgagcaggcgctcgtcggcgttgcgctcgctgctcagcaacacctgtaccggggtgccgttcttcatgcgcatggaagcgccgatgctcagcaggcgctggtcgttgccggtgctccagctctggaacaccggctggcgggcgtccgcctgcaagcgggcgagaagcgcgcggttggtcgcgacgctggccgcggcctggtcgccgaagctcatcagcggctggccgctgcggctgtcgagaatgctcaggtgcaggccgctgtgcgccaccagttggtcctgcagggcatgcgcctgtacggccgggtcgctgcgcaggtcgagatcgtcttccaggctgtggcggatctgctccagcttcaattgcaggatttcccgctcgcgggcttccagctcgcggccgaggttccagtgcgccattgcgccgagcgccagggccagcagcgcgccgagggcgccgaccagcagggccaggcgcagcgacagtcggcctggtggcgtcatcggcgcgcttccaggacgtagccgacgccgcgaatggtatggatcagcttgaggtcgaagccgtcgtcgatcttcgcccgcaggcggcagatggcgacttccaccacgttggagtcgttgtcgaagttcatgtcccagatcagcgagatgatctgcgtccgggtgatgacgtcgccgttgcgccgcatcagcaggtgcagcagggcgaactccttggtcgtcaggttgatccgcacccggccgcggaaggccctgtggcggctggcgtccagctccaggtcggcgacccgcaggacgtcctgcatcggtgcctggtcgtggcggcgcagcagcgagcggacccgcgccagcagttcggggaactggaacggcttgaccatgaagtcgtcggcgccgagatcgaggccgcgcaccttgtcggtcagcctgccatgcccggtgagcatcatcacccgcgcgctgctgcgttcgcgcaggcggcggagcaggtcccagccgtcgatgccgggcaggttgacgtcgaggatcaccagttcgtaagggtgttgcaaggccatgtgcaggccgtcgatgccatcgttggcgcggtcgacgatgtagccgctttcggtcaggccctggtgcaggtagtcggcagtcttgacttcatcttcgataataaggatgcgcatgttcgcccctatataaagtatggattcatttgcaagtaaatgtttaagtgcattgctataaagttacattgcgggcgttgcctggatagaatcctggaaatgtaatttcatatcgttgcgctgcttcgatgataattatcgaatgaccgggtagttctcccgggagtccgcctgagaactttggaaatgtccgcggcgcaagcaccgctgggcgtgagaggcaatgccttttgtaagcgcatgttgcttttgtccctatgtttcatccaactattgccagtctcttcgaaggttgccgaagtgtaaccgctaattgtccgtggagaatattcattaccgacttgtaattcttccgtcaccttgccgataagccccgctacctaacatctgccgcatcccggaagtgcaacttcgaatatcgccggcgagatatcgccgatgaacggttgcgtggttccgggccggtaatggatcgccgtcgccgacgacgatcagcagacgaggagcggaacatgccgatacttcggccactggccagcgcggggaaacgcgcctgctggctactgatgggactctgcctgggcctgccggccctggcgaacgaagcgccggtgagtttcaacggcacttcgatcagcctcgagcaggcgttggagcgggccctgcggagcaaccccgagctggcggcggtggggcgcgagaccgagatcgccagcggcgcgcggcagcaggccgggctgatccccaacccggatctatcctggagcgtcgaggacacccgccagggcaatcgccagaccagcgtcagcatcgcccagccgctggagctgggcggcaagcgcggtgcgcgggtagaggtggcgaaacgcggcagcgagatcgcctggacccaactggaagtccgtcgcgccgaactgcgcgcccaggtccgcggcgcctactacgcggcgctgaccgcgcaggagcgggtgcgcctggcgaagacctccctggacctggccaggcgcgcgctgcaggccgccgaccgacgggtcaaggccggcagcatctcctcggtggaacgggttcgcgcccaggtcctggcggacaacgcccagctcgacctgagccaggcggagctggagcagcagcgcacctatgtgcagctgtcgagcacctgggacgagccgcagccaggcttcgccagggtcggcggcgcgctcgacgcggtgccggcgagcatcacccgtggcgccttgctgcgccatctcgacgagtcgccgaccctgcgcctggcggcccaggaggtagcgcgcggcgaggcccaggtcgacctggagaagcgccagcgcatccccaacctgacggtcagcatcggcagcaagtacgaccagaccgcccgcgacggacgtggcgaacgggtcaacctgatcggcctgtcgatgccgctgccgctgttcgaccgcaaccagggcaacatctacgccgcccagagccgcgccgaccaggcccgcgacctgcagcgcgcgaccctgctgcgcctgcgcagcgaagcggtacaggcctacgaccagttgcgcacctcggaacaggagctggcgctggtccgtcgcgacctgctgcccggcgcacagagcgcgctggactcgatgacccgcggcttcgagatgggcaagttcaacttcctcgacgtgctcgatgcccagcgcaccctggtcggcgtccgtgcccagtacgtgcgcgcgctggacgccgcggcacaggcgcgggtgagcatggagcgcctgctcggcgaagacatcggccacctcggccagtgagatttccggggcgggccgccggcgcgccccccgaacggttcgggagaacagaatgggcaagaagacgattatcgcggtgaccgcactggcactgctcggcctgggcggcggcgcctacctggagctgggcgggaaggcgccggccggcgccggcgaagcggccgccgagggcgagggcagcggaccgcgcggcggcatgttgttgcgccagggcgacctgaccctggaactgctggtgccggaggacggcagcccgctcaaggcctgggtcgagcgcggcggcaaggcgctggcgccgcaggaggtggtcctcggcgccgacgtcgagcgtgccaccggcgaggtcgaggacctgctgttcaaggccagcggcgatggcctggtggccaatgccgggatcgccgagccgcatgccttcaccgcgcgcctcaagctgatggccggcaagcagggctacgacttcgccttcacccgcgaggagggcaagctggagctggatgccgagcagatcgaggccgccggcatcaccctcgatacggcgcggacgatcagcctggcccaggtggtctcgctgcccggcgagatccgcttcaacgaggaccgcaccgcgcatatcgtcccgcgcctgccggggatcgtcgacagcgtgccggccaatcttggccaggcggtgaagcagggcgagctgctggcggtgatcagcagcccgcagttgtccgaccagcgcagcgaattcgccgccgcccagcgccgcctgagcttggcgcagagcacctacaagcgcgagcagcagctgtggaaggagggcatttccgccgagcaggaattcctgctcgcccgccagggtttgcaggaagccgagatcgcgctgaacaacgcgcgggcgaagatcgccgcgctcggcggcaatcccagcctgcagggcggcaaccgctacgagctgcgcgcgccgttcgccggggtgctggtggaaaagcacctgacccagggcgagccggtggacggcaccgccaacgtcttcaccctgtccgacctgtcctcggtctgggccaccttcaacgtgcccgcgcaactgctcggccaggtccgcgtcggcagcaaggtcaaggtgctcgcccaggcgctggatagcgaggtggagggcaccgtgtcctacatcggcgacctgctcggcgagcagacccgcgcggccaccgcccgggtcaccctgagcaaccccgagagcacctggcgcccgggcctgttcgtttccgtgcaggtggccgaggcgacccgcaaggaagtcctgacggtcgccgacggcgcggtgcagaacgtcgacggcgaggacgtggtgttcgtccgcgtggccgatggcttcgtggtccagccggtcaagctgggcatcagcgacggccagcgcgtcgaggtcctcgagggcctgcgcgccggcagccaggtcgccgccagcggcagcttcatcctcaaatccgaactgggcaagggctcggcggaacacggtcactgagtcccgctccaggagtcttcgcatgttcgaacgcatcatccaattcgccatcgagcaacgctggctggtcctgctggcggtgctggggatggccggggtcggcatcggcagctaccagaagctgtccatcgacgcggtcccggacatcaccaacgtccaggtgcagatcaataccgccgcccccggctactcgccgctggaagtggagcagcggatcacctacccggtggagaccgtcatggccggcctgccgggtttgcaggaaacccgttcgctgtcgcggccggggatttcccaggtgacggtgatcttcgaggagggcaccgatatctacttcgcccgccagcaggtcaacgaacgcctgagcacggcgcgcgagcaactgccggaagacatctcgccgaccctcgggccgatctccaccggtctcggcgagatctacctgtggacggttgaggccgaggagggcgcgaccaaggaggacggcagcgcctacacgcccactgacctgcgcaccatccaggactggatcatccgtccgcagttgcgcaacgtgaagggcgtggccgagatcaacaccatcggcggctacgccaagcaattcctcatcgccccggatccgaagaagctcgcggcctacaagctgaccctcggcgacctgcagaacgctgtgctgcgcaacaacgagaacgtcggcgccggctacatcgagcggcgcggcgagcagttgctgatccgcgcgccgggccaggtcaaggacatggacgatatccgcgggatcatcgtttccaacgtcgacggcgtgccgatccgtatccgcgacgtcgccgaggtcggcctgggcaaggagctgcgcaccggcgcggccaccgagaacggccgcgaagtggtgctcggcacggtgttcatgctgatcggcgagaacagccgggaagtggcccaggcggtcggccagcgcctggaggagatcaaccggaccctgcccaagggggtcaaggcgatcaccgtctacgaccgcaccaccctggtggacaaggccgtggccacggtgaagaagaacctggtggaaggcgcggcgctggtgatcgcggtgctcttcctgttcctcggcaacatccgcgcggcgttgatcaccgccaccatcatcccgctgtcgatgctgttcaccttcaccgggatggtcggcaacagggtcagcgccaacctgatgagcctcggcgcgctggacttcggcatcatcgtcgacggcgccgtggtgatcgtcgagaacgccatccgccgcctggcccacgcccaggcccaccacggccgccagctgacccgcgcggaacgtttccacgaggtcttcgccgcgtccagggaggcgcgccgggcgctggtcttcggccagatcatcatcatggtggtgtacctgccgatcttcgccctcaccggggtggaggggaagatgttccacccgatggcgttcaccgtggtcaccgcgctgctcggcgcgatgatcctctcggtgaccttcgtcccggcggcgatcgcgctgttcatcaccggcaaggtcaaggaggaggagaacttcgtcatgcgccgcgcgcgtctggcctacgaaccggcgctgcgctgggtgctcgggcaccgcgcgctggtggtcggcggcgccctcggcgcgatcctgctcaccgggctggtggcctcgcggatgggcagcgagttcattcccagcctcagcgagggcgacttcgccatgcagggcctgcgggtgccgggcaccagcctgacccagtcggtcgagatgcagcagaccctggagaggaagctgatgggcaagttcccggagatcgagcgggtcttcgcccgcaccgggaccgccgagatcgcctccgacctgatgccgccgaacgcctccgacagctacgtgatgctcaagccgcagagccagtggccggacccgaagaagtcgcgggaggcgctgctggaagaattgcaggccgcggcccttgaggtgccgggcagcgtctacgagttctcccagccgatccagttgcgcttcaacgaactgatctccggggtgcgcagcgacgtcgcggtgaaggtcttcggcgacgacatgcaggtgctcaacgacaccgcggagaagatctccaaggtgctgcaaggcatcgacggcgcctccgaggtgaaggtcgagcagaccaccggcctgccggtgctgacggtggacatcgaccgcgacaaggcggcacgcttcggcctcaatgtcggcgacatccaggacaccgtggccaccgccctcggcggacgcaacgccggtaccctgttcgagggcgaccgccgcttcgacatcgtcatccgcctgccggaaaccctgcgcgccgacctgccggcactgtccaacctgctgatcccgctgccgccgaacaacctggcgcggatcgacttcatcccgctgtcggacgtggcgcgcctcgacctctcgccgggaccgaaccagatcagccgggagaacggcaagcggcgcatcgtggtcagcgccaacgtgcgcggccgcgacatcggctcgttcgtgctggaagcgcaacagaagctgcaggacggggtgaagatcccggccggctactggaccacctggggcggccagttcgaacagttgcagtccgccgccaagcgcttgcaggtagtggtgccggtggcgctgctgctggtgttcaccttgctcttcgccatgttcaacaacgtcaaggacggcctgctggtgttcaccggcatccccttcgccctcaccggcggggtgctggccctgtggctgcgcgggataccgctgtcgatctcggcggcggtgggtttcatcgccctgtccggggtggcggtgctcaacggcctggtgatgatctccttcatccgcaacctgttgcaggaaggacgcagcctcgaccaggcggtgtgggagggcgccatcacccgcctgcgtccggtgctgatgaccgccctggtggcgtccctcggtttcgtgccgatggccctggccaccggcaccggcgccgaggtgcagcggccgctggcgacggtggtgatcggcggcatcctgtcctcgaccatgctgaccctgctggtgctgccggtgctctatcgctggacccacgggcgcgacgccggaccgcgcgaggagacgccggcggccggctgaagcgggcgcgcaagcgggccggcaggggaaaccctggcggccctttttcgttggccgttggacggattccgttcgattaccgcacgcgattgccggcccggattgtcgccggcggagggcttgcgtagtgtgggtggacgttccgcgcccggcgcttggcgccgcgcggcgataacaacaacgatagcagcctgagtgtcctgcccatgaatgcctccttgctcagcgagcgcagccgggtgttcgaacgtgccgacccctatgcggtgtccggctatgtcaaccggcacgtcggtacgcactgcatacgcctgccggccgccggcaggccgcaagccagcctcgaccaccgcaccttcgccagcctcgacctgtgccggatcagctacggcgcggcggtacgggtcacctcgccggcgctggagagcatcttccacctgcagatcctcctgcgcggccactgcctgtggcgcggcggcgggcaggaacacgccctggcgccgggcgagctgttgctgatcaacccggacgatccggtcgacctgacctattcggcggactgcgagaaattcatcgtcaagctgccctgcgcgctgctcgaagcgatctgcgccgagcagcgctggagccatccggcgcgcggcgtgcgtttcctcgaacatcgctatcgcctggaccagctggaaggcttcgtcggcctgctcgccctggtctgccgcgaggccgagtccggcgagcggctggcgcgggtcgacagccacttcgagcagatcctcggcagcaagctgctgaccctgctgaagaccaacgtcagccgcgaggaccccggcgatgcgcaggtcgtcttcgcccgcctcgatgcctacatccgccgccatctgcagagcgagatcgaggtcgcggcgctggccgagcaggcgcacatgagcacccgttcgctgtacgcgctgttcgagcgccagcttggcgagagccctcggcaatacattcgccggctgcgcctggagcgcatccgcgcctgcctggaagaccccggctgccgggtacgcaacctcaccgaactggccctggacttcggtttcgcccacctcggccgcttcgccgagcaatatcgccggcagttcggcgagctgccttcggaaaccctgcgccggcgcgcctagcgccgaccgccacggcgtgcaggaatcggccagcgatccgcaggcaacggatatccccagcagcacgcgctacctaacctgaccgggcctgaacaataacaacggaggccccggccatgtccctgggtagcgattacttgcgttctctgctcgaggaagaccccgagcgcggcgtctaccgctgcaagcgggagatgttcaccgatccacgcctgttcgaactggagatgaagcacatcttcgagggcaactgggtctatctcgcccacgaaagccaggttgccggagtcaacgactacctgaccacccagatcggccgccagtcgatcgtcatcgcgcgcaaccgcgacggccagctcaacgccttcatcaacgcctgcagccaccgtggcgcgatgctctgccggcacaagagcggcaatcgcagcagctatacctgtccgttccacggctggaccttcaacaactccggcaagctgctcaaggtcaaggacccggccgaggccggctacccgcagggcttcaactgcgagggctcgcacgacctgacccgggtggcgcgcttcgagtcctaccgtggcttcctgttcggcagcctcaaccccgatgtcaggccgctggccgagcacctgggcgagtcggcgaagatcatcgacatgatcgtcgaccagtcgccggaaggccttgaggtgctgcgcggctcttccagctatgtctacgaaggcaactggaagctcaccgccgagaacggcgccgacggctatcacgtcagctcggtgcactggaactacgcggcgacccagagccagcgccagcagcgcgccgccgcggacccgctacggaccatgagcgccgcgggctgggcccggcagggcggcggcttctactcgttcgagcatggccacatgctgctctggagtcgctgggccaaccccgaggaccggccggccttcgagcgccgcgccgagcttgcccgcgacttcggcgaggcccgcgccgactggatgatcgagaactcgcgcaacctctgcctgtaccccaacgtgtacctgatggaccagttcagctcgcagatccgcatcgcccggccgctgtcggtggaccgcacggaaatcaccatctactgcatcgcgccgaaaggcgagagcgccgaggcgcgcgcccggcgcatccgccagtacgaggacttcttcaacgtcagcggcatggccaccccggacgacctggaggagttccgttcctgccagcagggctaccagggcagcgtggtcggctggaacgacctgtcgcgcggcgccgaacactggatagagggcgccgacgcggcggccgcggccatcgacctgcggccgcgcctgagcggcgtgcgcaccgaggacgaagggctgttcgtattgcagcatcgctactggcaggaggcgctgctcgccgccctggagcgcgaacggacgcagcgcgtggcgctgcgggaggtggcgtcatgagcctgggctacgacgccctgcgcgatttcctctaccgcgaggcgcgctatctcgacgacaaggattgggacgcctggctggcgttgtacgccgcggacgccagtttctggatgccgtcctgggacgaccgcgaccagctcaccgaggacccgcagcgggaaatctcgctgatctggtacggcaaccgcggcggcctggaggaccgggtattccgcatccgcaccgagcgctccagcgcgaccctgccggacacccgcacctcgcacaacctgagcaacatcgaactgctcggcgaggacgacggcatctgccgcgcgcgctgcaactggcacaccctgagctatcgctacaagaccgtggacagctacttcggcaccaccttctacgacctcgacgtacgcggcgagagtccgctgatcaaggccaagaaagtgatcctgaagaacgactacgttcgccagctgatcgacgtctaccacgtctgacgcccgcgccggcgggctgtcgagggacatgccatgaaccatcggatcgcactcaacttcgaagacggggtgacccgcttcatccatgccgcgcccggcgagaccgtggccgacgcggcctaccgccagggcatcaacatccccctggactgccgcgacggcgcctgcggcacctgcaagtgcctggccgaggccgggcgctatgcgctgggccaggactacatcgacgctgccctcagcgccgaggaagccgcccgcggctacgtgctgacctgccagatgcgcgccgaaagcgactgcgtgctgcgcgtgccggcgtcctcgaccctgtgcaggaccggccaggcgcgctacgaggcgcgcatcagcgaagtccggcaactctcgccgagcaccatcggcctgtcgctgcgcggcgaggcgctggccagcctggcgttcctgcccgggcagtacgtcaacctccaggtacccggcagcgagcagcgccgcgcctactccttcagctcgctggcgaaggacggcgaggtcagcttcctgatccgcaacgtccccggcgggctgatgagcggcttcctcagtggcacggccagggccggcgacagcctggcgatggacggcccgctgggcagtttctacctgcgcgagattcaccggccactgctgatgctggccggcggcaccggcctggcgccgttcaccgcgatgctcgaacggatcgccgaacagggcagcgcgcacccgctgcacctggtctacggggtgacccacgacgtcgacctggtcggtctcgagcgcctggaggcgttcgccgaacggattcccggcttcacctggagcgcgtgcgtggccagcgccgacagcgactatccgcgcaagggctacgtgaccgagcacatcgccgcgcagcacctgcacgagggcgacgtcgacatctacctgtgcgggccgccgccgatggtcgaggcggtcgagcgctacctgcgcgagcagggcgtgcgcccggcgaatttctactacgaaaagttcgccgccagcgcggcctgaacccgagcgagccaaggagattcccatgaacgacagattccgcgacaaggtcgccctggtcagcggcgccgcccagggtatcggcctgggcgtggtccggcgcctgctggaggaaggcgcgcgggtggtggcggtggaccgctccgagctggtccacgaactggccggtgacgcctgcctgtgcctgaccgccgacctggagcgctatgccgaatgccagcgggtactggagcggaccctggagcgtttcggccggctggacatcctggtcaacaacgtcggcggcactctctgggcgaagccctaccaacactacgccgaggacgagatcgaggccgagctgcggcgttcgctgctgcccaccttgtggtgttgccgagcggcgctgccggcgatgctggggcagggcagcggggcgatcgtcaacgtctcgtcggttgccacccgcggggtcaaccgggtgccctatggcgccgccaagggcggggtgaacgcgctgaccgcctgcctggcgttcgagaccgccgaccagggcatccgcgtcaacgcggtggcgccgggcggcaccgacgcgccgccgcgaaggattccgcgcaacgccgcggcgcagagcgaggaggagcggcgctggtatcgacagatcgtcgagcagaccctcgacagcagcctgatgaagcgctacggcagcatcgacgaacaggtcgcggcgatccttttcctcgcctccgacgaggcgtcctacatcaccggcgtgaccctgccggtagctggcggcgacctcggctgagcgcttcagtcgccgctttcggtgaacttctccaggtacagccgcagatgctccagggagtgctcgcgcagccactggcggaccgcctcgaccatcggcggaggcccgcacaggtagaggtcgaaagcttcgtcgcgcaagcgggcggcgtcgaaatgctcgtgcaggtagccgcgccggccatcccagtcggcgtccgcctcgctgagcaccgggacgaagcggaagccgggaagccgctcggcgtagccggcgatccgttgcaattcgcagagatcggcggcgcggcgtaccccgtagtagagatgcaccggccgctcgcaaccgcgctcggccagttcgtcgagcatgccgaggaacgccgacaggccggtgccgccggccaccagcagcaacggacgctccacctggcgcaggtagaaggtgcccagcggcgcctcgaagcggatctcgtcgccgacccggcacccttggcgcaggtagtcgctcatggcgccgcccgggagcaggcggatgaggaactgcaggtggttctgcggattcggccggttggcgaaggagtaggcgcgccggcagtcgctgccgggtacttgcaggcgcgcgtactggccgggcaggaagtccagctggcggcccgcggcgccggcgtcgaggcggagcagcgcggtgtcctcggagagcaggcgcagttcgcgcaccacgccgctgtgcgcctgggccgcggcggcatggcagagggtcgaggcgaagtcgaagtagaaggccgcgtcggagcgcacccgggtctggcaggcgagcaccttgcgctgctccaggtcggcggcggagagggtgtcctcgtcggcgtagtccaggctgtagctgcccgcctcgcagcggcccatgcaggtgccgcagaccccttcgcggcagtccagcggcaggttgatgccgtggcgcagggcggcgtcgaggagcaggtcgtcgtggccgacgggcaggaacagggtcttgccgtcggcgaagctgagggcgactttgtgattcatcgtgacggggcccgccgttcagaggtggtagaagtcgaggaccgagtcgatccggtcgttgagcaggacgatgtgcttgcgcgcgatcagccaggcctcgccatggggtttcaggcggtaggtggcatggccgaagaagctgccggtctggtccaggcgctggaacagggtctgccagttgacccgcactcgcagcaggccttcgccttcctcggcgatgcgcacgttgccgatctggtgcagggtgcgcggcatcggcacggtggacgcggccttgccggtgcggatacggaacacccggtcttccaggccggcacggctggggtagtagatcagcgacatctcgcgcttcggatcgcgggtgtagcgctgctcggactcccactgcggcaggtggaactcgcactgttcgtcgaactgcgcgaggtagccgtcccagtcctgggcatcgcagagttcggcgtggcggtagaggaactgttcgacgcggtactgcagtccggcgttcatggggtcacctccttcgcgcgcagggccaggcgctccaggccgtcgaggaggaagcgccgccaatgcgcgtgctggttgacgtagaggccttcgtgggtgatctcggtgccggtcagcagcggcgcgatacccagcgcctggctgttcggcgtcgcgccttcgagccacttgccgtggccgcgggagatgtcgctccagcgctccaggcgggcctggaagccacgctgggcttcgcggaactccaccaggtcgtcgggcgtgcccatcccggagacgttgaagaagtcctcgaactggcggatccggttctcccggtcggcgtccgactcgcccttgacgccgatgcactggctgacgatctcggtacggttccaggccagcgggcggacgatgcgcagctgcgagctgatctggtcgatgacgaacaggctggggtagagattgaggttgcgcaggcgatgcatcatccactcggcgcgggcctggccgtattcccccaccagccgcggcatcacgctggcgtagccggggcgtacggcggggttgggcatctcgctgaagagcacgctgtggccgttggcgaaggagaaccagccgtcgtcggtggccgcgtcgccggcgccgagcttgctgtagtcgagggtggcggccacgccgccgcgctcggcctcgacctgctggcggtgctgcacggtggctacgtagttgtagtgcactgtgctgacgtgatagccgtccaggccattctcgttctgcagcttccagttgccttcgtaggtgtaggtggaggtgccgggcagcacttccagctcgccgctgggagactgcgccaccagcatgtcgaggaacacccgggcgtcgccgaggaagtccaccaggtcgtcctcgccggcgacgtccaggctgacgaagacgaagcccctgtagctctggatgcgcgctttcttcaggccgcgggtggccttgtcgaagccttccgggtattcgcccggcgccttgaccttcaccagccggccgtcgttcttgtagcaccaggcatggaacggacaggtgaaggtcgactggttgcccttgccgacccgtaccagggtcgcgccgcgatgctggcaggcgttgaccagcgcgtgcaactggccgttgccgtcgcgggtgacgatcagcggctggcgtccggcgcgcagggtgacgaagtcgtggggcctggccagttcgctttcgtggcaggcgtagatccagttcttttcgaagatcagctccatctccaggtcgaacagctccggttcggtgaacatgtcccgggcgatgcggaagatgccttcctcgggacggaagtcgagacagccgccgacatagtcgcgccactgttcgaggcttctgcgggtagcgttcatgcgttctcacccttgtgcgttgtcgttatgggtgacccattcaacggccacgagcgggggcgggctatccgcttagtcgacgatgcgcatcccgaaaatccgcagccgccgaggagcggccgagggcctcgcggagggctcgttccgggttcgagcggcgcttgcggcggacgctttgtccggaaagtcggcgaacgctatccggatagtggaggatgcggggagtcggccttgcgccggcacatgccttgcattttgctgaaaacagagcgccagcagagcgcacccccagccttgccgtgtcgagtgccgaaccatgatgaggagccatcccgtcgccgatcgtggcgatctccatgccgaccacctggacctggccgccgcccgttcctggatgtcgaaggtctgcgggccgcaccggctcgaagcggcgagcccgggactggtgcagttccagcaccacggcaacgtgctgaagtcgatgtgcaccacccttggctacatcggctacggtaccgacgtcaccatcaccgtcgaggatgccgcggcgttcaacgcctacagcctgagcctgccgctcagcggcgagcaggagctgtgccggggcgggctgcgcctgctctccgacgtccgccgcggggtgatcatcgcgcccaacgagcgccaggagctgagcatcgccggggactgccgcaagctgcaggtggtgatcggccgcacggcgatgcgcaaggtcctggaggagatgttgcagcggccgatcgatacgcccttgcgcttcgatccggagatggatgccctggatggcgcctccgcgtcctggtggcgcaccgtgcggcacatcagcgaggagatggcgcgcagcgaactctacgcccaggcgtttttcagcagcgacctggaacgcgcgctgatcaagggactgatcctggcccagccgaacaactacagcgaggccctgcagcagggccttggcgggcgcccgccgcactacctgctgcgcgcccgcgagtttctccaggccaacgcccgcgagaccctgagcctggaggacgtggaacgcgccgccggggtctcgcggttcaagctgttcgagggcttccgtcgctacttcggggtgtcaccgatgagctacctgaagcactaccggctcgccgcggtgcgcgaggaaatcctcgccagcggcggcgcccgcagcatctcgacgatcgccctgggctggggcttcagccacctcggacgcttctccgtggactaccgcaagcgcttcgaggaaaccccgagcatgacccagcgccgcgctgcgcggcgctcctgagagggcgttcaggcgtcctcgcggccgatcagcgccaggcagcgccgcaggtgcggggagccgtcgccctggcgccggctgacgatgatcggcgaggtcagggaggcgtcggccagggcctggtaggcgacgtcgtcgcggtgctgcaactgcaccgaggccggcaccagggtcgcgccgagtccggcggcgaccaggccgatggcggtctgcatctcgttggcccattgcgtcacgcgcaggctcaggccgtgggtggcgaacagcgccagcacgtggtcggcgtagctcggccgcggctggccggggtagagcacgaacggctcgcgcgacaggcgctccaggctcagcggctggccgagcaacgtgtgcccggcgggcagggcggcgaccagcggctcttcgctgagcacgctctggcggatcgccgggtcgtcgatgcggatgcgtccgaaaccgatgtcgatacgcccgctcttcagcgcctcgacctgttgcagggtggtcatctccagcaggcccagctccagctccgggtcgccgcgcaggtggcggatcagctccggcagcacgccatacagcgccgagggcacgaagccgatgccgaaccactggcgctggccctggccgatccgccgggtgctgtcgcagatgctttccagttggtccaggagcgtcgcgctctgttcgtggaagaagcgcccggcttcggtcaggcgcagcggccggccgcgctccagcagggccaccccgagcatttcctcgagttgctggatctgccggctcagcggtggctgggcgatgtgcaactgctcggcggcgcgggtgaagttgagggtccgggccagcgcctggaagtagcgcaggtgacgaagctccatgatacctccagggtatggttcgagaggaagatgatattggaccccagtgaagaaggcgatggatgcttggccgaaacgacggcgaaacccgctcggtatcgagcgagccttgagcagcgaaccgtcgaaaacccgaccgcaaccctggtggacccccgagaatgagccaagccgtgatccaaagcctcgagtcgatcatcgtcgacctgccgaccatccgcccgcacaagctggccatgcacaccatgaaccggcagaccctggtgatcctccgcctgcgttgcagcgacggcatcgagggcctcggcgaagccaccaccatcggtggcctggcctacggcagcgagagcccggagagcatcaagagcaatctcgacgcgcatttcgccccgttgctgctgggccagccggcggacaacgtgaatgccgcgatgcagcgcctggaccgacacatcaggggcaacaccttcgcccgctcggcggtcgagaccgccttgctcgacgcccatggcaagcgcctcggcctggccgtcagcgaactgctcggcggccgcctgcacgacagcctggaggtggcctggaccctggccagcggcgacaccggccgcgacatcgaggaagccgagcggatgctcgacctgcgccgccaccggcatttcaagctgaagatcggcgccggtgaggtggatgccgacgtggcccacgcgatcgccatcaagcgcgccctcggcgagcgcgccagcgtgcgggtggacgtcaaccaggcctgggacgaaggcgttgcccagcgtgcctgcgcgacgctcggcgacaacggcatcgctctgatcgaacagcccatcgcccgccacaaccgcgtcggcctggcgcgcctgagcagccgcggcggcgcgccgatcatggccgacgaggccatcgagagcgtcgaggatgccttccacctggctcgcgagggcgccgccccggtgttcgccctgaagatcgccaagaacggcggaccgcgcgcggtgctgcgtagcgcggcgatcgccgaggcggccgggatcggcctgtacggcgggaccatgctcgagggcggcatcggcaccctggccgccgcccacgccttcgtcaccctcgaccgcctggcctggcacagcgaactgttcggcccgttgctgctgaccgaggacatcctcctcgagtcgccgcgctaccaggatttcaacttgcacgtgccgcgtgcgccgggtctcggcctggcgctcgacgaggagcgcctggcgcgcttccgccggcgctgaagccgtcccgcagacagaggagaaacgaccgatgctgttccacgtgaagatgaccgtgaagttgcccgtcgacatggacccgcaacaggccgagcggctcaaggccgaggagaaggaaatggcccagcgcctccagcgcgagggcagctggcggcacctctggcggatcgccgggcactacgccaactacagcctgttcgacctgcccagcgtcgaggcgctgcacgacaccctgacccggctgccgctgtttccctacatggacatcgagatcgacgggctttgccggcatccctcgtcgatccatgccgacgaccgctgagattcccttcccacgcccgacaacaacaagcagaggcaaacgccatgaccgtgaagatttcccagactgccgatgtccagcgcttcttcgaagaggccagcggccagctcaacgaacgcggcgatccgcgcaccaaggccctggtgcggcgcatcctcgacgacacggcgaagctgatcgaagaaatgcaggtcacgcccgacgaattctggaaagcggtggactacctgaaccgcctgggcagccgccaggaggccggcctgctggccgccgggctgggcctggagcattacctggacctgctgctcgacgcccaggacgccgaggccggcctcaccggcggcacgccgcgcaccatcgaagggccgctgtacgtcgccggcgcgccgctgagcgacggcgaggcacggatggacgacggccgcgacgccggcaccgtgatgttcctccagggccgcgtcagcggtcccgatggccagccgctggccggggccatcgtcgatgtctggcacgccaatacccaaggcacctattcctacttcgacagcagccagtccgaatacaacctgcgccggcgcatccgcaccgacgccgacggccgctaccgtgcgcgcagcatcgtgccgtccggctacggttgcccgagcgacggcccgacccaggaactgctcgaccgcctcggccgccacggccagcggccggcgcacattcacttcttcgtctcggcgcccggccatcgccacctgaccacccagatcaacctggcgggcgaccgctacctgtgggacgacttcgcctatgccacccgcgatgggctgatcggcgacctgcgcttcaacgacgaccccgccgcggcccgcgaccgcggcgtggagggcggacgcttcgccgaactggatttcgacttccagctccaggccagcccggcacccgccgccgagcgccgcagccagcggccgcgggcattgcaggagtaaggtgggaaacggggagggcggctggtcgctggcgaccatgccgccttcttccgccaggcgcgacggcggataaaaaaaggcgccatgactggcgcctcaggacttgtccaaaggagcaacccaaaaaggacaagtgtattgctcggtgaaaggctgctcagccgttgccgttcttgcgctcggcgcatttgctgcggtcggtcttctgcgcttgcgcttccagttgttgcttctgcaggcgcttttcgcgcagttctttctgcgcggcgcggaattcggcgttgtactgccaggagcgttcgctgccgtcctgggcctgggcagtagcggcgccggtcgccagcagggcggccagcagcatcgggatgatcttcatggcaaacctctcgggttggctcgtcgccggggcgaggtattcgtcccgtttgagcaaagagtaagagcggacggattacccgagggtgagtggaaaattacgtttccgataacttcggcgatgctccgttgcatggcggaggagtctgcgcgaagcgcattaagtgcgagttaagattgcggaaaagtaatccccgcctcatgtctgcgtcatttccccggttccagaatcagccccacggtcaatgccggttgcggcaggactgcgcgggggcgcgatcgaccagaagttcacgcacagccagcgccgcaaggcatggccgcagaagaaaaacagacatgaaccgatctggagcaatcgccatgcaaggggatggaaagaaacgactgtggacgcttccactgctgctgggcgccggactgatggcctcggccgtcgccgaggagaacgccgagcggagcaaggaaggtttcatcgagggcagcgaggtcaacctgctgctgcgcaacttctacttcaaccgcgacttccgcaagggccaatcgagcccggcgggcggcggctacaccgaggagtgggtgcagggcttcatggccaacttttcctcgggcttcacccagggcacgctgggcgtcggcatcgacgccttcgcccagctcggcgtgcgcctggacagcggcggcgggcgttccggcgccggcggtagcgtcgacctgctgccctatgacgaccaggggcggccgcaggacgactattcgcgagccggcggcgcggtcaagctgcgctggtacggcaccgtgctgcgggtcggcgacgtgttcccggaaaccccggtgatccagtacggcaacagccggctgttcccctccagcttccgtggcttcaccctggtcaacgacagcctggcgaagggcctgaccctgcaggccggcaagctgaactcgatgacccagccgaacagcaccagcggcagcgacgacttctacagcttctacaccggccggcgcatcgactcgccgtgggtcgcctacgccggcggcgactaccaggccaccgagcactggagcgtcagcctctacggcagccgccagaaggacgcctgggaccagtactacgccggcaccagcttcaactatccgctggacgacaagctgtccctgctcggcggcgccaactactacaaggtcaaggaccagggcaggcaggtgatgggcgaactcgacaacgacatctggagcgtgcgcggcggcttcgcctacggtccgcaccaggtgctgctgtcgtaccagcgcaacaacggcgacgacgacttcgactacctgcgccagaccgactccatctacctggacaactcgatccagtacagcgacttcaactcgcccaaggaacgctcgctgatgctccgctacgacctcgacatggccgccttcggcgtgccggggctgagcttcatgacccgctatggcaagggctgggacgccgattattcgaatgccaacagcgtctacatgcgcaccgacgccaacggcaacccgctgaccaaccagggccgctgggaacgcgacgtggaggtcaagtacgtggtgcagggtggcgcggccaaggacctggcgttccgcgtgcgccaggccaccgtgcgctccgatagcttcgagtcggacctcgacgaagtccgcctgatcgtcgaatacccgctgcaagtcctctgaaggcgcgccgccgccccgtccggggcggcgctctgcgacagcccgttgctggcggctgcgcggcggcgctgctactttcctctgggtaggcgggccgaagggcggttcctggccgggcatggcttcgacctgccggtgggcgccgcgacccgaacctcggccacgccattccacccatgccgcccgggcaccggcgtgcccgtggcagcccaggctacgggcgccgcgtagccagccaagcgggagtcgacatggcctcgtggaccttggtggacgccagtgcgatcgctgtccgccatccctacaccttctacaaaccggacgcggagaccatcgaccgggtcgccgccggggaaagcgtcaagctgatcttcgccttcgataccgacaaccccgatgcgccgcgcgccgagcggctctgggtgacggtcgagggcatcgaggcggatggcgccttcagcggccgcctggacaactatccgcaatacatccgcgacctgtcgctgggcgagcgcatcgtcttcgaggcgcggcacatcatcaacaccgagcacgacccgcgggaaacgccgatctcgcgctatgcccggcgctgcttcgtgacgcgccgggtgatagacgaggggaaggcggtcggctacctctaccgcgaggcgccggaagaggaaaacgacagcggctggcggctgatggccggcgacgagtcggacgactacatgaataccgccgggaccaccgcctacgtcagcctgggctcggtgctgaacgccgacgacagcatcctgccgctgctcgacgcgccgccgggacgggcgttcgagcggctggccgacggttccttcatcgaggtgcagggaccggagggttgagcctcagcctggcagctcggcgaggaagcgctccaggcgctcggccagggccaggtagtcgtcgggactgcggttgctgcccatctttcccgacctgacccgcctggcgtcgctgcgctcgcgctcggcgcggctggcgagggccagacgcagggcgctggccctcgccggcgactcctccagcagcggtcgcgccatgatccgcgcggcgtcggcgtcgccgtattgcagggcgaggagcaccgtattcgggtcggagatcgcgccgagccgcaacaggcgttcggccaagaccgcatcgaggtgcgcggcgccaatctgcaggctgtcctggtgcaccgcgacgccctggtcgagcagccatctggcggcctccaggcgcccgcgggcgaggcaggcctccagcacgccgccgcgtccgcgcaaggtttcggcgaagtcgcagccggcatcgcgcaggcgttgcagcaggtcgatgtcgccgtcttgcgcagcttcggccagggccagttgacgcagccttggctcggcggccaggctgccgtcggcgagggccggccgccagtcgaggatgcgctggcgcagcaggacttccaggcggcccttcagcgccttgccgggctccccagcggcctccagggcgtccagcgcttccagtagctcgtcggccacgccgcaggcgttctcggcatcgaacggatcctgttcgaaggacagcaggcggaacagcccgccgacgtcgtcggccaggcgcgtcaccgaatcctggtgcaggcgtccggcccaggccggcggcaggccgtggctccaggcgattaccgcgccatgctcggggccgggttcgacgcagacgtagagccgctccaggtactcgaagccaccgaacggcaggtaggccagcttgccgttccagtcgcggccttcttctgccgcggcttccgccgccagctcgcgctcgtgttcgatccagccccagaggtcgtggtagccgtcgctgtccggatagaacagttcgctgaaagagaacgggtggcggtggccgtcgtagtcgacttccaggtcatagccgaggcgcccgccgaaacaggtgcgccagaggcgtagcaggtcttctggaatcggtccggccaggccttcggcaagacgctggacgtgttcggcggacaccggcggttgggcgtcgtacaccacgcagccgtcgaacacggccaggcgatgggccagcaggagttggcgttcggcgggggagagttccattctctgtggtcctgtcgattcggggcggccactctagcacggcgagggtgcgcgttccgcaacgccttggctatcatgcgcggctttccatccgccctggccggagtccgtcgaaccatgcacaccttgcagcaactgcgcagcggcgaactggccggcgccacgcgcctggacctgtcctgcggcctgcgcgagttcccccgggaaatcttcgagctggccgactccctggaggtgctcaacctcagcggcaacgccctggacagcctgccggacgacctcgggcggctgcatcgtctcaaggtgctgttctgttccgccaacgacttcgacgaattgccggcggcggtgggcgactgtccggcgctgagcatggtcggcttcaagttcaaccgcatcgagcgggtgccggccgcggccctgccgccagcgctgcgctggctgatcctcaccgacaaccggattgccacgctgcccgaggaactgggtcgccggccgttgcagaagctgatgctggccggcaaccgcctggaggccttgcccgagagcatggccgcttgcgaaggcctggaactgctgcggatcgccgccaaccgtttccagcgcctgccggcctggctggcgacgctgccgcgcctggcctggctggcctacgccggcaacccgttgtgccgtctgccggcgctggccgacagcggcatcgctgcgctggactggagcgagctgagcctggacggtttgatcggcgaaggagcctccggggtcatccatcgcgccggctggcaccagccggacggttcgacgcgcacggtggcgctgaagctgttcaagggcgaagtgaccagcgatggcacccccgccagcgagatggccgcctgcctggcggcggggcgccatgcgcaattgatcgaggtgctcggccagctcgccgggcatccgcaagggcgcgacgggctggtgctggagctgctcgacgacgcctatcgcaacctggcggggccgccgagcctggagtcctgtacccgcgacgtctatccgccgggactgcgcttcgagctggccacggcgctgcgcctggcggcctcgctcgccgcgttgatggcccatctgcatggacgcggcatcagccatggcgacttctatgcgcataacatcctctggcgcgaggatggcgcctgcctgctgggcgatttcggcgccgcgtcctttctcccggacgacgccgtgctcgccggcgccctgcggcgcctggaagtacgtgccttcgcctgcctgctggaagagttgctcgagcgcagcgaggcgccgccggggcaggcctcgctacgtgcggcgctggtcgagttgcagcgacgttgcgcgctgccacgggtgagcgagcggccggacttcggcgagatccaggcgatcttgcgcgaccttgccgctcgcagccaggcgtttcctcaagttcgatgaatttgtccgaaattgaccgcaggctgataaatatcaacgtagttctagcgggcttggagctagactgacaagtatgtcaggaacgcggccaacgagggtaaacatggattcctacggcgtcactttcgcaatcatcgtgctgggcatgctcttcatcggcacgggtttcaccaagcgcgacacgccgttcggcctgttcctcatgtgggtcggggtgatctgcatgctggccatcatcagctaccgcatctatatcgccacccattactgaagcgccacccgcgcctgcaatggcgggcgcggaggtccgccgctcagtcgcgcgtctcgcccatggcccgggcatagccggacggggcgaagcgcagggtcaccagcaacatcgccaccacgctcgccgcgagcagcagccaggaggcctggaagctgccggtgacgtcgcgcagccagccggtcaggtagggcacgatgccggtgatgatgaagccgatgccttgcacgaaggccgccaggcttcccgccgcacgcggctcgtggaggtggtcgagggtcagggtcaggctgagggcgaagcaggcgcccaggccgtagccgatcaacgccacccacagcgccgcgtgctgcagcggcatcagcagcaggccgcagaagccgccgagctggaccagcagcgcggccagcagccagggccggcggtcgaggcggcggcgaatcagcagcggcacgctgagcgcggcgagcacctggaagatggtcatgatcccgaccagcccgccgctgtcctgggcgctccagccgagctggcggtagtacactggcaaccaggccaccatgctggtgtagccgccgttgatcagcccgaaatacaccgccagcagccagccacggcgattgccgaagaagtgccggaccggcccctcgccagcgctcggcagcacctcccttggccgcgcgaacatccacagcagcagcgccagcagggccggtacggcccaggcgccgaggccggcctgccagttggagaagtgttcggcgatccgcgggctgagcaccgccgcggttccgccgccggccatcagcgaggccgagtagaggcccatcgccgccgggacccgcctcgggaaccagcgcttgaccacgcccggtaccagcgcctggatgatcgccacgccgctgccggccagcgcggcgctggcgatcagcgccagcccgctatccagttccaggcgccagaggcaggctgcggcgatggccagcagtccgcagacgatgccgcggtgctcggccagccagcgcccgagccagggcagcaacagcgccaccaggcccatgcagagcaccggcaacaccgtcagcagcgacgcgccctggaagccgagaccggtgccggcggtgatttcctcgagcagcgggccgatgccggtgaggatcggtcgcaggttgatgccgaggcagaagatcaccagcaggccgacccaactgacctccgccgcgccgacgccgctggcggcctggccgccggaagggattcgcgcgctcatgcctggcgttgccgccattgccggtacagaccctcttcgccggcaggacgcagggcgcgtagcggcaggctctgccgctgtggcgggcgcgccatctcggcgtagagcgtggccgtggacaggccgaacggttcgccgtcctcgttggaataggcgaaccaggccgcctggatgccgcagagatgcatggcggccagacacatcgggcagggatggccgctggcgtagatcacacaaccgtccagacgcgggctgccgagcgcctgactggcctggcggatcgcctgcagttcggcgtgggcgctgggatcgtgggtctcgtggatctggttgacgccgcgggccaggacccgcccgtcgcgcaccagcacggcgccgaacgggcggccgccggcctcgacgttggcgcgggcgagggcgatggcctcgcgcatgaaggtttcatcggacatgtctttctccttcgctttcattgggcgccggcggccagcagcagccgctcgatcccgccctggccgcgctggcgggcgtgggccagcgggctgacgccgtcggcatcggccaggttgacgtcggcgccggcgtcgatcagcaggcgcacgatctcctggtggcgcggaccaccgtcactcagcaggatcgcctcgagcagcccggtccagccgagcttgttgacatggttgggatcgaccccggcttgcagcagcgtcttcaccacttccacatggccgcgttcgcaggccgggatcagcgcggtgccgccatagcggttggtactcttcaggtcggcgccgtggagcagggtcaggcgcaggatttccaggcggccctcggcgccggccagcagatacgggctgtcgagccggctgttctgccggttgacgtcggcgccggcctcgatcaactggcgcgccaccgccaggtggtcgttggcggtggccagcagcagcggggtgctaccgtcggcgctgggcgcgtcgacctcgaccttgcgttcgagcaggctggcgacctgcgcggtatcgccgcgacgcgcggcttcgagcaatgctccggcgtcgctcgcgccggcgcctccgctgaatgctgcgcagaccagcatggctccgctcctgcatagattggccagggacatgtcgatggactccgataggcgttggcgaaaagtatggcgtcgatgtcatgtatgctgaaattaaatgatgtaatgcctttcagtgggagtgtgcatgctcgatctggtcctgctccgtaccttcgtcagcgttgtcgacaccggcaacttcacccgcgccggcgaacacctgcacctgacccagtccaccgtcagccagcaggtcatccgcctcgaacagaacctcggttgccgcctgctcgaccgcagccagcggcaggttttgccgaccgaggaaggcgagcgtctgcttggctacgcgcggcgcctgctgcggctctcggacgaggccagcgaggccctcagcccggcccatggcgacggcgtgctgcgcctcggcgtgccggaagacctcgccggtgaagtgctgatgccggtgctgacgcgcttcaccgaagagcgtccgcgactgcgcctggaggtcgagagcggtctcagccatcacctgctgcgcctctatcgcagcggcgagctggacctgctgctggtcaagcagtggggggccgacagcgactgccatgcacgctgggccgagccgctgggctggttcggcagcgccgcgcggccgttcggcgagggttcgccggaggagccggtgccgctggtggtgttcccggtcggcgcgctgtatcgccaggagatgatccatgccctggagagcatcgggcgtcgctggcgcatcggctattccagcgccagcctggccagcctggtggccgcggtcggcgccggactgggggtcagcctgctgccgctgggctgcgtcgggcccgagcatcgcctgcttggcgcgcagtccggcttcccgcccatcgctggcctggagctggcgctctacgcgcggcccgagctggacagcgccgggcgcaccctccgcgaccgcctgcgcgacctctgcgatgcacgcctggaagggttgcagggcgagcgctgagcgctgtctccgggctatgatccggctccctcagcgaatggacacggaagcccgccacatgtcccgacccaccctgcaagtcgacctgctggtcgagtccttcaattacaaggcctggtccgaccgccgcaccctcgatgccatcgcccggatcgacgccgaggcgttcccggcctcgctggccttcgccttgcaacagctcaatcacatggcgatcgtcgaggaactgttcagggcacgcctgctgggcgagccggcgccccaccaacagaccaacagcgaggtggtgcctggctacgacgtcctgcgtcgccggctggaggattcggccgcctggttcgccggctatgtcgccgagctgccgctggagcgtcgcggcgaatggctgcgcttccgcttcgccgatggccgcgacggcggcatgacgcgccaggagatcctcttccatatcgtcaaccatggcacctaccatcgcggcgccatcggtcatgccctcgacctggcgggcgcgccccggccggcggatacctacaccctgtatatccactccgcgcagccggagcggcgggaatagcccgcggcaatggccgccagcctctacgccatcgccgagaaacgacgtggggctcgaccgagcccccgcgctgcgcataaaaaagccccgcgaccaggagctgcaatcgcggggctggagtggccgatttccatcggccgggggatagccggttcaggcgctgggttgccagccaccgccgagggagcggtagatcgccacgatgccgcggtacagctcgacctcggcctgggcctgggcatcttcggcggagagttgctcgcgttcggcgtccagcagcaccaggaaatcggtggtgccttcgcggtagcggatcgccgcctgttgcgcggctgcgcggctggcttccgactggcggaccagcgagaccaggcgctcctggcgcttgccatagtcgctgaaggcattcgccgattcttccagggccagcagcacctgctgttcgtagctggccagcgcggcgtcggcgtcggccttggcgccgcgcaggcgggcacgcacgctgccgaggtcgaaggcggcccaactgatgctcgggccgacgctccaggcgcgggcggcgctcgagccgatctgcgagccccgcccggcggtgaagccgaggaagccgctgaggctgacccgcgggaacaggtcggcggtggccacgccgacgtcggcggtgctggcggccaggcgccgttcggcggcgcggatgtccggccggcggcgcagcagctcgccgggatcgccgatcggcagggccttggtgatcgccggcaggtcgcgcggcgaaaggtccactgtcaactcttccggccgttggccgaggagggtggcgatacggtgcctggcgcgctcggcttccgcctgcagttgcggcacgctggcggcggtggccgccaggcgcgcatcggcgcgcagtacgtcgagttcggcaccgaccccggcgtcgcgcagttgctcggtgagctggcgcgactccttctggttctccaggttgctcagggcaatcttctcgcgcagttgcgcgccgcgcagttggccgtaggcgtccaccagctcggcgatcaggctgacctgcagttgctgcaggtcggcctcggccgcttcgctgagggcgtcgctggactccaactgacggcggatgcgcccgaacaggtcaagctcccaggcgctatccaggccaaggtcgtagcgctcgctgttgacccggtcctcggtcactcccggttgctggcccttgccgatgtcggcgctggcgcggctggtgaccaccgggaagcgatcattggccacgtcgtcgcgcagggcgcgggcggcgcgcaggcgggcgaaggccacgcgcaggtcgcggttgccgctcagcgactgttcgaccaactggttcagggtcggatcgtcgaactgtttccaccacaggctttcgaagcggctgcggtcgtagggcttgctcgccgtggcgtcgatcttcgccgccgcggtgtcgggggtccggtagtccggacccaccgtgcaggcgctgagcgccagcagactgaacagacccagggcggacgcgagcccgctccggatcgactgcgcgtgaatcatgcatgcacctctggcaggcctttgtcgttggcggcgcggcgcgcttcgcggttctccacgaagcggcggatgaggacgtagaacaccggcgtcagcagcaggccgaagaaggtcaccccgatcatcccggagaacaccgccacgcccatcgcatggcgcatctcggcgccggcgccggtggagatcaccagcggcaccacgcccatgatgaaggcgatggacgtcatcaggatcggccgcaggcgcaggcggcaggcttccagcactgcggcgacgcggtccatgccttcctcctgcttgtccttggcgaactcgacgatcaggatcgcgttcttgcacgccagccccaccagaacgatcaggccgatctgggtaaagatgttgttgtcgctgccggccaggatcaccccggtgatcgccgacagcagggtcatcggcacgatcaggatcaccgccagcggcaggctccagctctcgtactgggcggccagcacgaggaaggccagcagcacgcagagcgggaagacgaacagcgcggtattgccggcgaggatctgctggtaggtcagctcggtccactcgtaggtcatgccgttgggcagttcctccttcagcagcttctcgatcgccgcctgcgcctggccggagctgtagcccgcggccggggcgccgttgagttcggcggtgatgaagccgttgtagtgcatcacacggtccggaccggaggtgtcgctgaccttgatgaaggacgccagcgggaccatctcgccgaggttgttgcgcaccttcaactggccgatctgctcgggttcgaggcggaactgctgctcggcctggacgttgacctgataggtacggccgaagcggttgaagtcgttcgcgtacagcgagccgaggtagacctgcagggtgtcgaagatgtcgctgatcgccacgccgtgggtcttggccttctcgcggtcgatgtcggcgtcgatctgcggcacgttgacctggtagctggagaacaccgagctgggttccagctcaggcagcgcacgggccttggtgatgatgttctgggtctgcttgaacagctcctcgtagccctggttgccacggtcctcgatctgcaggcggaagccgccgatggtccccagcccctgtaccggcggcggcgggaagatcgcgatgtaggcgtcctggatgtcggcgtacttggcgttcagcgcggcggcgatggccccggccgactggctcgggtccttgcgctcgtcgaacggcttcagcggggtgaacacgatgccgctgttcgggctgttggtgaagccgttgatcgacaggccggggaaggccaccgagtccgccacgccgggctgcgccagggcgatctcggacatctgcttgatcaccgcctcggtacggtccaggctggccgcgtcgggcaactgggcgaaggccaccaggtactgcttgtcctgctgcgggacgaaaccggtcggcgtgctggagaagccgaagtaggtcagcaccatcagtccgccgtagaccagcagggcgatcgagctgccgcgcaggacccggttcaccgtgccgacgtagccatggctggcgcggtcgaagaaacggttgaacggacggaacagccaactgccgaggagcttgtcgaggaacaccgagaagcggtccttcggctcgtggtggcccttgagcaggaccgccgccagcgctggcgacagggtcagcgagttgaacgccgagatcaccgtggagatcgcgatggtcagggcgaactggcggtagaactgcccggtgaggccggagatgaacgcggtcgggatgaacaccgcgcagagcaccagcgccgtggcgatgatcggcccggtcacctcgcgcatggcacgcttggtggcttccaccggcttgaggccgaggccgatgttgcgctcgacgttctccaccaccacgatggcgtcgtccaccacgatgccgatggccagcaccaggccgaacagcgacagcgcgttgagcgagaagccgagcatgtgcatcaccgcgaaggtgccgatcagcgacaccggcaccgcggccagcgggatgatcgaggcgcgccaggtctgcaggaacaggatcactaccagcaccaccagcaccagggcttcgaacagggtgtgcaccaccgcctcgatggagccgcggacgaagatggtcgggtcgtagacgatggagtagtccatgccttgcgggaagctgtgcttcagctcggccatcttctcccgcaccaggttggagatctcgatggcgttcgagccgggacgctggaagatcgggatcgccaccgccggcttgttgttcagcagtgaacgcagggcgtactggttggagcccagctcgacccgggcgatgtcgcgcagacgggtgatctcgccgttggcgccggcgcggatgatgatgttctcgaactcttcctcggtgaccaggcgaccctgggtgttgatcgacaactggaagctggtatcgctcggcgccggcggcgcgcccagggtgccggcggcgacctggcggttctgctcgcggatggcgttgaccacgtcggtggcggtgaggttgcgcgaggcgaccttgttcgggtccagccagacgcgcagcgaatagtcgccgaggccgaacaactggacgtcgccgacgccgtcgaggcgggccagttcgtccttcacgttgagcaccgcgtagttcgacaggtagagcatgtcgtagcggttatccggcgaggtcaggtgcacgaccatggtcaggtcgggcgaggccttgtcgacggtgatgccgagccgggtcacttcttccgggagcttcggctcggtccgggtgacgcggttctgcacctgcacctgggcgttgtccaggtcggtgccgagggcgaaggtgatggtcagggtcagcttgccgtcggaggtcgactgggaggacatgtagagcatgttctccaccccggtgatcgcctgttcaaggggagaggcgacggtctcgccgatgactttcgggttggcgccggggaagttggcgcggaccacgacggtcggcggcaccacttccgggtattcgctgatgggtagctggaacagggagatggcgccgccaatcaggatcagcagcgacagcaccgcggcgaagatcggccgctggatgaagaattgggagaaattcatcggttcttcctatcgccgcgctcagccgcgcggctcgttgcgagtggcgttgtccttggacgccgccaccttcggtggttcgctgtcgccgaccgactgccgcaggcgcgcgagggtggccagggtgtcggcgctggccatctcgaccttctgcggatccacctgcatgcccgggcggacccgctgcaggccattcacgacgatccggtcgcccttgctcaggccgctgcggacgatgcgcaggccctccagcttcggtcccatctcgacggtgcggtagacggtcttgttgtcgccatccaggaccagcacgaacttcttgcccaggtcggtgccgaccgcttcgtccttgatcagggtggcggcgtaggtcttgctgccgaccagcttcaggcgcacgtagaggcccggggtgaactcgcccttggcgttgtcgaacacggcgcggccgcggatggtgccggtacgcgggttgacctggttgtcgaggaagtccagccggcccaggtgcgggttgccgtcctcgctgctcaggccgaggtacaccgggctctcgctgcgcgtgtcgcgaccggcctggcgggccagctcgacgtacttgaggaacacgcgctcgtcggcgtcgaagtaggcgtagaccttgtcggtgctgaccagggtggtgagcagggtctccccggagttgaccaggttgccggcggtgacctcggcgcggctgacgcgaccgtcgatcggcgcggtgatccgggtgaagctcaggttcaggcgcgccgcgtccagttgcgcctgggtcgcggcgaccgccgccttggcttcctgggcggcggtggtgcgggcgtcggcgagttccgcggagatcgcgttgctggcgcgcaggcgttcgccgcgctgggcttcgttgacgctccgcgcctgggccgcgcgggcctgttgcagctgggcttcgaggcgcttgacctcggcctcgaacgggcgcgggtcgatctggaacagcaggtcgcctttcttcaccagtgcgccttcatggaaggccacgcggtcgatgtagcccgacacccgcgggcgcagctccaccgactccggggcctccaggcggccggtgaattcgtcccactcgttcagcggttgttcgatgacttcggcgacgctgaccttgggcgccgccatgccttgggtggtttccggggccttgccgcaggcgctcaggaccagtacggccgcgagtgcgagggggtagcgccaggagaagtgggatgactgttccatgcttgactccgccagtcggtttttcgggattggcgaagtctgcgggctgctccggcagggaactaatcgaacgacgagattttgattatcacgaacagtgatacatggtttttcgttttctgtaacagtcgatggttatggacagtgctttcgatggaataagccgcacacccgcggcgcgcgatcgattttcccgttgcgacgcctcgtgcgggtagctgccggagggctcagagactgtccggatcgccgatgaacatgctgatccgcgagcgcagccagcgttcggccggatcgttgtcctgggcgccgcgccaagccatcgacagttcgaaggcgcgggtctcgaacggtgggtcctcggcgcgtaggccgccggcggcgatcagcgcctgggcggcgtagtcgggcacggtggcgatgatgtcggtgccggccaggagggtgccgaggccgttgaactgcggcaccgccaggaccaccttgcgcttgcggccgaatttttccagctcctcgtcgacgaagccgctgaggtcgccggcgaaggacaccagcgcgtgcggtcgcgcgcaatagtcgtcgagggtcagctggccgggcgcggagtcggcgcggaggatcttcggcttgctgcggcgcacggtcttgcgcttggcgttggccggcagttcgtcggtgtagctgacgcccaccgagatctcccccgaggccagcaggttcggcatcaatagatagttggcgcggcgcacgacgaggacgatccccggcgcctccgcgcgcaggcggcggagcaggggcggcaacaggccgaactcgacgtcgtcggaaaggccgatgcggaacaccgcggtgctggtcgccggatcgaactcgctggcgcgactcatggcggtggagatggaatccagcgccggcgacaggtgggcgaagatttcctgggctcgcgcggtgggctccatgctgcgtccggtacggacgaacagcgggtcgtcgaacagcgtgcgcaggcgcgacagcgcggcgctgatggccggctggccgaggaacagtttctctgcggcgcgggtcacgctgcgttcgtgcatcagggtctcgaacacgatcagcaggttcagatcgacgcggcgcaggtcgtttcggttcatggcgttcctcgtttccaggggctagaggctgcaaccgcgggggctcgccgtcaagccttgcgtgcgagacggggcggggcctggcgaggtgccggaggggcataggatcactgacaggcatagccattatcaataacgacgggtggttttgtcaggcatgggcggatacagtcacaacccatgaggttattcaccccgtgatgcactgcagaggtttgcgatgtcccgagtgatccgttttcatcagtttggcccgccagaggtcctcaaatgcgaagagctgccgaccccggcgccggccgcaggggaagtcctggtgcgtgtccaggcgatcggcgtgagctggaaggatgtgctctggcgtcagaacctggccccggagcaggctgcgctgccgtccggtctcggcttcgaactggccggcgaggtgctggcggtcggcgccggcgtcggcgacctgccgctgggttcccgcgtggccagtttccccgcccatacccccgatcattatccggcctatggcgacgtggtgctgatgccgcgcgcggccctggcggtctaccccgaggtactcaccccggtggaggccagcgtctactacaccggcctgctggtggcctatttcggcctggtcgacctggccgggttgaaggccgggcagaccgtgctgatcaccgaggcggcgcgcatgtacgggccggtctcgatccagttggccaaggctctcggcgcgcgggtgatcgcttccaccaagtccgccgaggagcgcgagttcctccgcgagcagggcgccgacaaggtggtggtgaccgacgagcaggacctggtcctggaagtcgagcgcttcaccgagggcaagggcgtcaatgtcatcctcgacgaattgggcggcccgcagatgaccctgctcggcgatgtctccgccacccgcggcaagctggtgctgtatggctgcaacggcggcaacgagtcggcgttcccggcctgcgccgcgttcaagaagcacctgcagttctaccgccactgcctgatggatttcaccggtcatccagagatgggcctggaacgcaacgacgagtcggtgagcaaggccctcgcgcacatcgagcaactgacccgcgatcgcctgctcaagccggtggtcgaccgggtattcgagttcgaccaggtggtcgaggcgcaccgctacatggaaacctgtccgaagcgcggccgggtggtgatccacgtcgccgattgaggacgacccgcagcgaaagagcccggccatcgagccgggctttttcatgggcgcggtttcagatccacagatcgttgaccgccgtccgctcgccgccctggtcgccggtgttgcgcacgccgcagggctccaccaggagcatgcgcacctcgccctcggcgaacggcttgtgctccacgccgcgcggcaccacatacatctcgccggggcccaggtgcaccgcgccgtcgcggaaatcgatgcgcaggcgaccggcgaggacgatgaaggtctcgtcggtgtcggcgtggctgtgccagacgaagtcgccttcgatcttcaccagcttgaactggtagtcgttcatctgggcgatcaccctgggttgccagcggtcgtcgaacagggcgagcttggcggcgaagttgatcgcttgggttgtgctggtggacatcggtgcgctccggtggttggtctctggcgccagggtaggcggctacggagcgggcggtcttggatgatcgtgcaacctggctaggcgcggccgagcatacgcagccagcgtgccggtggcaggccgtagctctggccgaaatggcgggtcatgtggctctggtcggcgaaaccggcggcaagcgcggcttcggccagcgtctggccgccgagcatcagccggcgggcgatgtccagccggcgctggatcaggtagcggtaggggctggtgccgaacagcgcgcggaaatcgcgcgacaggctccagcgttcgcgctgggcgacctgcgccagttcgtcgaggcccagcgggcgctccaggtgcgcgtggatgtactgccgggcgcgctcggcggcgacgaagtcgaagtggcgcctgccgcgcgcccggttgccggccacggcgtcgagggcgtgggccagttcgaacagggcgtcctgttcttccagcggctccagcggggtatccatggcctgtagcagggcccggctggcggcgatcaggcgcgggtcgtcggacaagcccccgcgcacgaacggcagcggccggccgccgagggcctgctggatcagcgccggctcgacgtagagcatccggtagcggaacccttcctggctgccggcctcgccgtcgtgcagctcgtcgggatgcagcaccaggcagccgcccggcaggctgtggcgctggctgcggcgatagcggaagctctgcaccccggccagggtctggccgatggcataggtgtcgtggcgatgcggatcgtagccgtggccggcgaagtaagcctcgatgcgttccaccgcaccgtgttgcggggcgcgtcgaacccagtcgcggggcgtattggcgtggctcatggggaaaggctcgtggcgcggaaggttcaggctagcgcttcgttggcgcgactggaatagccggacggcgtctcgccgaatactgtgcggaaggcactggcgaagctgctcgggctttcgtagccgagcgaccaggcgacctcgccgaccgcctggcccgctgccagccgttcgacggccgcgtgcagtcgcgccagttgccgccattgcgcaaagctcataccggtctcggcgccgaacagccggctcaggctacggctgctgaggcccgcccagcgtgcccattcggccgccggccgcggatcgccggggttggccagcaatgcctcggcgatcctgcgcaggcgcgaatcccccggatagggcaggcgggtccgctggggcacggcgtggcgcagttcgtccagcagcacgcgcagcaggttctcgcgttcggtgctccaggcggagccggtcggccagcgggtggcgcgttcgacgatcagcgccacgaaagccgagcaggcgagcacgccggggtgccggggcaggtcgcggcagtgttcggcggcgaggtaggcgctccagcccgccaggctgccgtgggagtgcgccgagtgtgggtgacccggtgggatccaggcgatctggcgcggaggcagggcctggcggccatgctcgtcctcgaccaccagaaggccgcgctccaggcagtagagctggccgcaggcatggcggtgggaggccgtgcggctggctgcgcggtcgatgcgcagggcgaagagcgggacgggcaggggttccggaagcatttggcggaaaagcgacgatgattggcttgggatggataataggccattcgacggcggatgtagcctggcggctcatcattcttgcctggagcacgccatgaaagccgaagacatccttcccgaccgacaggaccgcatccacctgggcggcgtggagatacgcaagggcagcgtcggtgcgttcatcgccaacgcccggctcctgcttgaggaggaactgcccgcggcgcaacggcggcaggccgaagaagacctgcgcgccctgctgccggcgatccgggcactggggctgctggaactcttcgatctgcgcgacgcgcgactgcggacgctggtggcggattgggaaaacgccgctggccgctcctgagagcggcacacgggcacttggaggtatcagtcgtcgatgcagctttcgatcaggcgttgcagggcttcgcgctcactgaccggcgtgcgcatcggcatgtgcgcgaggctgccgtcgcggcgctcgatgatgtactcggtctcgaagtgcagggtgcaatcctcgaggctcacataggtgacgccataggtcggggccttgcgggagcgggctgagagcatggatgcctccttgggctcatttcttctcgctggtcgatgcgggcgcgctggcctgaaccgggcgagtaggggtcactgcattgctgtagaacgcggaagcggcgaagtagctggcgagggcgctgaagctggacatgatcggttctcctgaggaagggtgggcgtctgcccttggagagcatgtttgcccagcgggagaaccggcagaagtaaaaagcctgcatggtgtatatcgagcgcggtgatggatcaagcgaccccctccagccttgcgactgttcgccggtgttaccatatgacgtgtttttttctcaggaattcccatggccaagcgtggacgcccctgcggcttcgatcgtgaacaggcattgcgccgggcgctcgacgtgttctgggaggccggctacgaaggcgcgaccatggccgcgctgaaggaggccatgggtggcatctgcgcgccgagcatgtatgccgcctatggttccaaggaggcgctgttccgttcggcggtggaactctacctgagccaggaatgccagctttccaagggcgccttcgccctgccgacggcgcgcgagtcgatcgccgcgctgctggaaagcgccgccctcagctacaccaccgaaggcaagccgcgcggttgcctggtcgacctcagcacgaccaatttctcgccggccaacaaaggcgtcgaagactacctgcgcgatcaccggcggcgcgccgcgcgcctgctgcgcgagcgtttcgcgcgaggcgtggctgacggcgacgtaccggccggagccgatctcgacgcgctcaccagtttctacagcagcgtgcttcagggcctgtcgatccaggcccgcgacggcgccagccgccagcagttgctggccatcggccgctgcgcgatggcggcctgggattccctgctggcggtcgaggccgcctgacgccacagcgcgccttggctggaaaaagcccatggattctccgtgggcaaaaactataacgcgtgatatagaattgatccaaaccccgggcgaggtccttccgcgcgtgtctcgcgccctggccatcgcccgctgccgattggagctttcatgacaacgcttgctgatatccccctgtccatgctcgacctggtgccggtgcgcaccggcggcagcgtggccgaagccctgcacaactccctggacctggcgcgccatgtggagcgcctgggcttcaaccgtttctggctggccgagcaccacaacatggatggcatcgccagctccgccaccgcgctgctgatcggccatatcgccggcggcacctcgcggatccgcgtcggctcgggtggggtgatgctgccgaaccatgcgccgttggtggtggcggaaaacttcggcaccctggagacgctctacccgggccgcatcgacctcggccttggccgcgcccccggcgccgaccaggcgaccatgcgtgccttgcgtcgcgaccgcctgggcaacggcgacgacttccccgagcaggtcgccgagctggaaatgctgctcggcccgcgccgttcccagcagagcctgctggcggtgccgggcgagggtacccaggtgccgatctggctactcggttcgagcctgttcagcgcccacctggcggcgcagaaaggcttgccctatgccttcgcttcgcattttgcaccgcgttacctgcacgaggcgctgcgcatctaccgcagcaacttccagccctcggcggtactcgacaaaccctatgcgatgatcggcgtgccgctgatcgccgcacttaccgacgaagaggccgagttcctcgccactaccgccttccagcgcgtgctggcgctgatccgcggcgagagcctgaaacagaagccgccggtggaaagcatggcgccgttgtggctgccccacgagcaggatgcggtcggcagcttcttcggcctggcggtgatcggcggtccggagaaggttcgcgcgcgcctggagatcctcctggagcagaccggcgccgacgagcttatcttcaccagcgacttctacgagcacgcccatcggctgcgctcttgcgaaatcgtcgcggggctgaaaggggcgtgatccggggcctgtagggaaaatgatgtagacctgcgtgcggtagggtctttcggcgataggttttttggttctaaacttagaactaaaaacaataagccagagaggaaccctgccatgccggttgcacaccgactgctgttttcattgaccgccttgctggcggcgacggcccaggccgccgtcgacggccagaaactctacacacagggcggcgccaacccggccgccgcggcctgcgtcacctgccacggcgccgatggcatgggcctggccgccgccggctttccgcgcctggcgggccttcccgccgcctacctgagcaagcaactgcacgacctcaagcagggcggcagtcgcgagcacccggtgatgaagggcatagccgatgctctcggcgacgacgagatccaggcgctcgccactaccctcgcggcaatgccggcgcccaagccggtggcgctgtcgcgcgtggccaccccgcgcagccccggcgagaccctggcggtgcgtggcgcctgggagcgcaacattcccgagtgcgtgacctgtcacggtccggccggcagcggcgtgggggaggccttcccgccgttgcaggggcagggcgagatgtacctgagcaaccagttgcgcgcctggcagcttggcactcgccgcaacgacccgaacgatctgatgggacatatcgccaaatccctcagcgaagaggagatccgcagcgtcagccagttcttcgccaccctcggtcaggcaggaggccagccatgaacatgccgtcgatcctttccctggccgtcgccggcctgctggtcgctcccgtccacgcggcaacggcgccctcggagccgttccagccgccggcggaaagcagcctcccggacaacgccttcggcgaaatggtccgccagggccaggcgctgttcgtggaaacccggaagaacgcgccgcatctggtcggcaaccagctcaactgcgtcaactgccatctcgaccagggccgccgggccaactccgcgccgcagtgggcggcctacccggtctatccggcgttccgtgccaagaacaacaaggtcaatacgttcgccgagcgcctgcagggctgcttccagttcagcatgaacggcaaggtgccggcggccgatagcccggagatcaaggccctgaccgtctacgcctattggctggcgagccaggcgccgaccggggtcagcctgcccggacgcggctatccggacgtggccccgccggaaggcggctacagcatcgagcgcggcgccaaggtctatgccgcgcagtgcgcgatctgccacggcgccgacggccagggccagatggctctggggcagacggtgttcccaccgctgtggggcgcgcagtccttcaactggggcgcgggcatgcaccgcatcaacaccgcggcctccttcatcaagtacaacatgccgctgggcaagcccggtaccctcagcgaccgcgacgcctgggacgtcgccgccttcatgaacagccacgagcgcccgcaggacccgcgcctggtggacggttcggtggagaagacgcggcagaagttccatgccaacgacggcgtcaacctgtacggacagaaggtcaacggcgtgctgctgggacagggaatctgaccctcgtggcctggcgtccgcaggacggagacccggtccggcggaagcaggtcggcgcgggggtagggcggataacgccaacggcgttatccgccgatgcctgggcctcggtccggcggatagccgcgggcggctattcgccctacgggggccggttggcgggtgggcccgcgcatcacttgcgcagcggcatttccagcgtcacccgcaggccgtccgcgcggctgtcgaagtccagccggcattggcagcgttgcacgatagcctggacgatggccaggccgagcccgctgccgccgctcttgccgtggcgccagaaacgccgggtgaggtgcggcaggtcggtttcggcgatgcccggaccgtggtcgcggacgtggaagcgcgcgcagccttgcgcggtttccaccgccagctccacccgggtgccggcggcggtgtggcgcagggcgttgtccagcaggttgcgcagcgcggcgatggccagcaccgaggggacttccagcggcgcctcggacaagccgtcggccagcttcagctcgaacatccgcacgtcgccgtggccggcgtcgtgcatggctacccgggcggcgtcctcggcgctgcattgcacgccgtcgtcgaacgacaggctgccttccacccgcgccagcagcaacagctggtccagcgtccggtgcagacggtcggcgccttcctcggcgtgggccagggcctgctcggcggcggcgccctcggtcatgcgcgcgacctgcaggtgggtcttgatcgcggtcagcgggctgcgcagctcgtgggcggcatcgccggtcaggcgtcgctcgcgttcgatggcctgggcgatgcgctggaacaactggttctgggtttccaccagcggcttcagttcgctcggcagggccgccagctccagtggctccagcgagtcggcgccacgtcgggtgagggcgtcgcgaatccgcttgagcggcgccagaccctggccggcgccgagccagagcagggccaggctgccgagcagggcgaccgtcaccggcaccgcggcggccaccaccaccgagcgttgcagcacgtcgcgctcttccaggcggtcggcggtgctgacccgcagatcgccggcctgcacggtgaagctgcgccacagcacgccgttgatttcctggtcgcggaagccgctggcggtgctgtccagcgcccgctccggggtggcatggctctgcgccaggacttcgccgcgcagtgagctgacctggcaggccatgccgttgggaattcccagttgctccgcgctgaggcgcgtggtctggccgtccgccggctgcggctgtggcaactgctggagcaggccggcaaccatccgcgccgaggccgccaggcgttggtcgaaggagcgcatcatctgcccgcgcaggtcgcagagcatccaggccgcggccagcgaccagagcaggatgaaggccgagccgaggatcagggtcaggcgcaggcgcaggctcatgcgtcgtctccgtcgccgcgcgccggcccgaggcggtagccgaggccgcgcacggtctgcacgatggcgttgccgagcttgcgccgcaggtgatggatgtggacgttgagggcgttgctctcgacctcgtcgccgaagccatagacgctgtccttgagctgctcgccgctgaggatccgcccgcggttgttgagcaatgcctgcaacagcgcctgttcgcgtcgcgacagctccacggggcgaccgtcgagccaggtttcgcgggtgctcggatcgtagctgaggcgaccgtgttcgatgacgttgacgcagcgcccggcggagcgccgttgcaaggtatgcaggcgggcgccgagttcgcgcaggtcgaagggcttgagcaggtagtcgtcggcgccggcctgcaacccggcgacccggtcggtcaccgcgtcgcgcgcggtcagcaccagcaccggcaggtcgacgccctgctggcgcaggcgttgcagcaggcgcaggccgtcctcgtcgggcaggccgagatcgaggaccagcacgtcgaagcgcgccacctggagcagcgcctgggtatcggcggcgctggccacccggtccacggtcaggccctgggcgttgaggccggcgacgatgccgctggcgatcaggtcgtcgtcttcggtgagcagtacatgcatggcggtatcgctggttaaagggataggagtctgaagcgggcgaattaagccaggattatgccccgcccggcgcgtcgccggggttttcccgtggccgcgttaacggcctgttaatcgtcgctggccatgctgccgccgagttcatcgtagaaggcgttatccatgcgtgtgttgatcctgctcctgatgctcctgctgccgggcctgtcccaggcgcaaccgggcgacgacctgttcgcgccgcgcggcgcgacgcagacggatttcctgccggtggagaaagccttccgcttcacctgggagcgcctcgacgacggccaggtgcaactgcgctggcagatcgcgccgggctactacctgtaccagaagcgcctgcgcttcgacggactcgacccggccttgcagccgcagctgccgcccggcgaaagccacagcgacgagttcttcggcgagtcgcaggtctatcgccagagcctggaactgaccctgccggcggccgccgccggacaactgcgcctgggctggcagggctgcgccgatgccggcctgtgctatccgccgcagagccaggcgctcgacctgggcggtaccggccctgccgccgccgggacgagcggcgaagtcgccgaggaccagggcctggccggcagcctgcaggccggcaacctggcctggagcctgttgctgttcttcggcctcggcctgctgctggcgttcgctccctgttcgctgccgatgctgccgatcctcgccgggctggtggtcggcagcggcgccggccctcgtcgcggcctgctgctggccggtagctacgtgctgagcatggcgctggtctacgccggactcggggtggtcgcggcgctgcttggcggcaacctgcaggcctggctgcaacagccgtggctgctgggcagcttcgccgcgctgttcgtgttcctcgcgctgccgatgttcggcttcttcgaactgcaactgccggcggccctgcgcgaccgcctcgacggtctcagtcgcggccgcaagggcggcagcctggccggcgcggccgcgctcggcgcgttgtccgggctgctggtggggccgtgcatgaccgcgccgctggccggcgccttgctctatatcgcgcagaccggcaatgccctgcatggcggcctggtgctattcagcctgggcctcggcatcggcatgccgctgttgctgctggtgacggtcggcagccgcttcctgcccaagcccggtccctggatgaacctggtcaagggcgtgttcggcttccttttcctcggcaccgcctggatactcctgcgtccgctgctcggcgaggcgctgtggatcggccttggcggcgcgttgctgctggtcctggcctacgccgcgctgcacacggcgcgaggcctggcacggcacgcggtgctgttcggcgcggcgggctgcatcttcggtctctggggcgcggcgatgctgctgggcgccgcggccggggcagacgacccctggcgtccgctacaggtgtatgcggctgcgaaccggggcgctacgccgacggccagcgcgcatgaggcgttcctcacggtcagccaaccggccgagctggaccgtcagttggctgcggccaaggccgagggacaatgggtgctgctcgactactacgctgactggtgcgtgtcctgccggatcatggagaaacaggtgttcgccaagcccgatgtgctcgccgccctgcagggcgtgcgcctgctgcggctcgacgtgaccgcggataacgccgccagccgcgagctgctgcaccgctaccaggtacccggcccgccgagcctgatctggattggcccggaaggcgaggagcgccgcgcgcgccggttgaccggcgaagtcgacgccggcggcttcctcgcccattggcaggcgacccgggagcgcggctgatgctgagtttttccctggggccgctggtggtctcgctgcaacacctgctgctgttcctcgccctcggcgccgcgctgctcggtggttggctggcggcgcgcggcggcgggcgcaacgccgagccggtgctgttcaacctgttgttgctcggcctgctggtggcgcgcctggccttcgtggtgcgctactggccgcagtaccgtggcgacttcgcacagatgctggatatccgcgatggcggtttcctcgcctggccaggcctgctcgccgctgtgctcggcgcgctgttctgggcctggcggcgaccggcgctacgtcgctcgctgggtgtcggcgccagcctcggactggcgttctggctgcttggcagtctgggcctgggcatctacgagcgcggtacgcgcctgcccgaactgagcctgcgcaacgccgccggcgagtcggtgcaactggccgatttccggggccgcccgctggtgatcaacctctgggccagctggtgcccgccgtgtcggcgcgagatgccggtgctgcaacaggcgcaggcggagaatgccgacgtagtgttcctcttcgccaaccagggcgagagcgccgagaccgtgcgccatttcctccagggcgagaacctgcgcctggacaacctgctgttcgacaacggcgggcagcttggccagcaggtcggctcggtcgccttgcccaccaccgttttctacaccgccgagggccgcctgctgggcagccatctcggcgaactgtcccgcggcagcctggcgcgctacctcgaagccttcgagccggccgctgccgcccccgcaaccaggagttccgaatgagactgccgcgcaacctgatcacccttggcctgggcctgaccctcctcaacgccggcctggccacggcggcggaggagctgccggcgccgatccgcatggtccaggagaagggcgcccgcattctcggcagcttcgacgccccggatggcctgcgcggctacgccgccgaataccagaaccagggcatggcgctgtacctgacgcccgacggcaagcacgtactcaccggccacctgttcgacgcccagggcaaggacctcagccgcgaaccgctggagcgcctggtgtatgcgccgctggccaaggaaatgtggcagaagatggagcagagcgcctggatcgccgatggccgtgccgacgcgccgcgcgtggtctacctgttcagcgacccgaactgcccgtactgcaccatgttctgggagcaggcgcgaccctgggtggatgccggcaaggtgcagttgcggcatatcatggtcggcatcattcgcgaggacagcgaagccaagtccgctgcgctgctggccagcaaggacccgcagaaggcgctgcacgaccatgagcaggcgggcaaggccagcaccctgaagccgctggcgaatatcccggcggcggtgcgcaagcagctcgccggcaacatggaactgatggagtcgatgggcgccgcggcgaccccggcgatcttctatctcaatgccgaggggcgcatgcagcagcaacagggcgcgccgcagccggaccagttggcggagatcctcggtccgcgttgatcctccgggccggcgccgagccgccggccatctatactccctgcgttacgccaacccagcggagcgagggccatggacgacgcattcagcgaggaaggcagcgcgcagccgcgccatgacgctcagcgtccggcgctggccccgcggagcgacggtttcgacatccacacctaccatcccgacttcgtcgccgatccctatccgctgttgcggctgatccgctcccgtgcgccggtctgccgcgaccaggcctcgatctggtggatcagtcgctatgccgatgtttcggcgtgcctgcgcgaccgccgtttctccgccgaccccgctcgccttggcgccgccggcgtccgccagggcggcgccagctggttcggccaccagcaattgcaaccgctggcgcgcttctacgacaacttcatgctgttcaacgacgcgccgcggcacacccgcctgcgcaggctgttcgctccggccttcggccccgacgccgtgcgccgctgggaagcgcgcatcgaggtgctggtggaagaactcctcgacagcttgctggagcgccgcgagcccgatctgctcagggacttcgccgaaccgctgacgatccgggtggccgccgagctgttcggctttccccgcgaagataccgggcaactgctgccctggggccgcgatctggccgccgggctcgatctcgccgccagccacggcgatgccgggcagatcaaccgcagcgcggccgccttcagcgactacctgcaacgccaggcgcgcggctggagcgatggctcttcgcgcccgccgtccggcgcggcgccgagcatcctcgacggcgccgcgatgctggaggccggactgggccttgaggacctggtagcggcctatgccatggtgttcatggccgccttcgaaaccaccatcagcatggtcggcaacgctacgctggcgctgctcacccatcccgaccagctcgacctgctgcggcggtgcccggagttggcggcgaacgcggtggaggaactgctgcgcttcgatggcgcggtgcgcggcggcgtgcgttgcaccctggaggaggtggagatcggcggccagcggattccgcctggagagaaggtctggctgagcttcctcgcggcgaaccgcgacccggagatgttcgccgcccccgaccgtctgcaattgcagcgagcgaacgccaagcagcacgtggcgttcgcccatggtccgcactactgcctgggcgcgtacctggcccggctcgaattgcaatgcgcattgcgcggcctggtgcgtcgccgtttcgccctggcctcggaaccgacggacctgcgctggcggcgcagctcggtgttccgcaccctggagcgcttgccgatcgtcccggaaggcgacgctcagaagacctgcgagtagcgcaggatcagccggctgccctcgctgcggttgcgtgcgccgtattcgtgataggcgttgaggaacagccgcgacttgccccagccgaacatcagcgccgggccgatggcatcgacccgctcgcgggagtccgggcggtcgtggccgtcgacccgctcgtcggtgatctgtcgcaggctgtagccggacaacccgagccgccaatgcgcatccagcgccagcgataccgagtagttggcgtggaacgcctggcccggttgcaggtagtcgtcggccaacggcggcgccgggtcgcgattcttgcccggcaacaggtactgcaggcgagcgctggcttcccagccttcggcgaattcccaggtcagcgcgtagtgcgggttgaagctccagtggttgctgccgggattgatcgcccgatgcctgtcgtagcgcccggtgggtaactggaaggcgaggttcaggcgctgccagtagggccggccgaacagctcggtctgcggccattgcaggatgaacggactgacgatcaggttgccgaggccgttggcgctgccggcgtggggttcgaagtcgggatcggcgagcagcaccgggacgaggatttccgcgccgtagtaggcgccgaacagctggtgctggctgatgtgggcgaagtggctggtggcgagcagggtgcgcaggcggttgtcgagcgggcgccggtgaccgttggcgtccatgaagtcgtcggcctcgtagatattcacgaactgctggaacagcgtgccgggcagggccttgccgtcgaggaaggaggtctggccgaggttcatccccggcagcgcggcgatagcctggaacgagggcagcagcaggggcagggccagcaggctggcccggatgcgggtggtcatgggcgtgtccttcttgttgttgttttccacggggcagcgcgtcagtccggcaggtagtcgggctgacgctcggggctggcgcgctggaaggcttcgagcgccaggcagcgcccctccagttcgagcaacgccgggtagggcgccaggtcacagcccatgcgccgggcgttggccagttgcggtaccaggcagcactcgacgatgcccgctgcggcgccggcgaagaaggcgccgcgacggtgtcggttcagcagggtctccgccgccgccaggccctcggcgacccagtgcgcgtaccagcgctggcggtcctcggcgtctatgccgaggacctgggtcaggtacttgagcacccgcacgttgttcagcggatggatgtcgcaggccaccagcagggccagttccagcgcctgggcgcgatgcagtgggtcgagagggatcaggcgcggttcgggctgcacggcgtcgaggtagtcgatgatcgccagcgactggctgaaccggcggccgtcggcgtcgaccagggtcggcagcgcgcccatcgggttgcgctggcggtcggccgggcgcagttgctcgccctgccgcaggttgaccggcactacctggtaatccaggcctttcaggaccaatgcgatacgcacccgataggacgtggagctgttgaagaagctgtagagctgcatggaaagtcctgttcagagagtggtgggagaaggcctgacccggcgccggcccaggcgatgcacggccacggcggcgagcagcgccgggatcaccagcagggcgaggatgccgctgaagcccaggcccaggccgagcagggcgccgccgctaagggagccgacgatcgagccgatgcggcccaggccgagggcccagctgaccccggtggcgcggctgcgggtcggatagaagtcggcggccagggcgttggcgccgacctgcgagccgctgatgcagaaaccgacgccggcgacgcacagcgccagcagggcgaagctgtggtagaggctggcgatgccgaggatgaacagggcgccgccgacgtaggccaggctcagcacccggtgcgcgtcgaagcgatccatggcgctgcccaggaggagtgcgccgagggtgccgccgagctggaacatggcgctgatcgtcgccgcctcgccgagactgaagccggtgccgccgatcagcgtcggcagccagttggtcagcaggtagatgatcagcaggcccatgaaaaaggtggcccagagcagcagggtgccgccgcgcagctcggcgccgaggatctgccgcaggggcgaggtgccgtcggactcgtcggcgggcagttcgaggcgtccggcccagccgtcgggcaggcgccccaggcgttcgaggatgcgccgcaggcgcgccgcgtccggtgcgcggcgggcgaggaagcgcaccgactccggcaggcatgcccagagcagcggcaggctcgccaggggcaggccgccgccgagcagcagcacgctttcccagcccagcgccgggaccatccgcgcggcgagcaggccgcccagcgccgagccgagggtgaagccgcagaacatcgcggtgaccatcagcgcgcggtgccggcgcgggcagtattcggaggtcagggtgatcgcgttgggcatcgccccgcccaggccgaggccggtgaaaaagcgcagcagggccagggtttccaccgaaccggcgtaggccgaggcgaggctccagccgccgaagaacagcaccgagagcaggagcacgctcttgcgtccgaaacggtcggccagcgggccggcggcgaaggcgccgagggccaggccggccagcgcggcgccgaggatcgggctgagttgcgccgggctcagttgccagtcgtgggccagggccggggcgatgaagccgatggcggcggtgtcgaatccgtccatggcgacgatcaggaagcacagcgacagcactcgcaactggaaggcggaaaccgcctgcgcatcgatgaaggcctggacgtcgatcttgttgttcttgtcgggcgtaggcatgagcgttcctcggccgtcgccgtggcgacagcccggatgaagggcagggtgggcccgcgccgtgcgcgggcggtgggtcagaccacgcggacgctgagttcgccgaggccgccgatggcgccgagcatccgctcgccgcgctcgaccgcgccgacgccttccggggtgccggtgaagaccaggtcgccggggcgcagctcgaagaagcgcgacaggtagctgacggtttccgccaccgaccagatcaactggtcgatgtcgctgcgctggcgatcctcgccgtcgacctggaggctgatggcggcgtggcgcggatggccgacctggctggcagggtagagcgggccgatcggcgccgagcggtcgaaggccttgccgatctcccagggccggcccatctcgcgcatgcgcatctgcaggtcgcggcgggtcatgtccaggcccaccgcgtagccccagacgtgttcctcggcctgctccagggggatgtcgcagccgcccttgccgatcgccgccaccagttcgatctcgtagtggtagttgccggtctggctcgggtaggccagctccagggtgctgccggcggcgaccgggaccaccgcgtcggccggcttgcagaagaagaacggcggctcgcgctcgggatcgaagcccatttcccgggcgtgggcggcgtagttgcggccgacgcagtagacccgccgcaccgggaaggtctggtcgctgccatggatggtgaggctgacgggcgcttcgggcgcgaagagatggctcatgggacgggtccttcagtgggcgaggggttcgcgggattcgcggaggatgccgagcgcctgctgcacagggcggtcggagaaactgaacagcacgcagtcggtggcgccggcttccaggcgcagctcggcccaggagggcacgacgaacagatccttggcctcgaaggcgaagcgccggccgccgatctgcgccacgccgctgccttccaccaccgaatagacgctggcgtcggtgctgcgcacgggctgcccgaggaagccggccggcagcagttgcaggcaggtggcgatggtcggcatggcccagccgccggtggccgggttgacgtagcgcagcttgtggccttcccagggatcgggccgttcgaggcgcgccaggcgctcgagggcctcgcggctgcgcgcgtaggggtagctgaacagcggcgaggtcggcgtcgtcggctgatggcgcagcggcagcatgttgctgccgtagcgggcgaggctgtcgccttcgccacgtcgcaacggctgtaccggttcatcatggttttcggcgaaggtggcgccgaagaaacgcagcatcgggatgtccaggccgtccagccagaccaccggctcgccgccttccgcggcggcgcggttgccgtggtcgtgccaggtccaggacggggtgatgatgaagtcgcccggctccatgcgggtgcgttcgccgtccaccgaggtgtaggcgccgtagccctcgacgacgaagcgcagggccgactgggtgtgccggtggctgggggcgatctcgcccggcaggatcagttgcaggccggcgtagaggctcggggtgatcgccgactggccgggaaggtccgggttctccagcaccagcacgcggcgcaccgcttcctcggcgctgatcaggtcgcctgcctcgagcaggaacgggcgcagttcgcgatagcgccacagcgccgcctggcagccgccggcgggttgcgccgggaccaggctgtgcagggcttcccagagcggggtgaggtgctgctggcggatgcgtcgatagaagtcggcgcgcttctcggtggaattgtcgttatgcataccgatgaatctccggcgggaggaggcggggccgcctcggtctggtagtcattattcgaggtgaaggcataaccgaataatgatatttagacatcgacctatacgtattcgaggatggcttgcgatggactggacccgccgcctgcgcctgcaacacctgcaactgctggtcagcctgatggagaccggcaacctcagcggcaccgccagggccgcacacaccacccaaccgggcctgtcgaagtggctcaaggaactggaggaggacgtcggcgcgccgctgttcgagcgccacgcccgcggcctgcgcccgacgccctacggcatgaccctgttcaaccacgcccagcgcgtgctcaccgagatggagcgggcgcggcagaacctcgaggcgatgcgcagcggcagcggcagccgggtgctcctcggcacgtcgccggcctccgcgccgagcctggtgccgcgcgcattgcgggcgttcctcggacgctaccccggggcccaggtggaactgctcgaaggcaccatgaacggccttctcgaacggctggagaaacgccagctcgatgtggtggtggggcgcctggacaactatgcgccgcgcgccagcctgcgctgcgaggtgctctacagcgaggcgatcgtggtgatggcgcggcccggtcacccgctggcccaggccgccgcgctggactgggaagacgtgcggcgctacgactggatcgtctggccgcccggctcgccgatccgcagcaagctcgacatggccctgacccagggcggccggcagccgccggcctaccgcctggagtcatcgtcgatgctggccaacatcgaattgttgcgtggcagcgacatgctatccatcggctcggcgcgggtggtcgagcaccttgccgggctcggcctggtggccaggctggcgctggagattcccggcgagggcgcggtgggcatgtgctggcgcgacgaaccgcaccgcgaccgtgccagcgaagacctgctggcctgcctgcgcgaaggcgcggcggccgagtagggcgccggccggcgggtgctattgcaaaaaggccgcggcttctcgacaatgcgattcattatcattcatgtgtcgccccgactttcccatgtccgccccgatccttctcagcgcccaccatcgcgccatgcatgcgctgtacagcgagcaccatggctggttgcagaactggctgcgcggcaagctgggctgcgcggcggacgcggcggacctggcccaggacaccttcctgcgcatcctgctcaagcgcgaactgcgcgagatcggcatgccgcgcgcgttcctgcggaccatcgcccgcggcctggtgatcgaccactggcgtcgcgaggaactgcagcgcgcctacctcgaaagcatcgcccacctgcccgaggcacaggcgccgtcgcccgaggcgcgggaactggtgctggaactgctggaggaaatctcgcggatgctcgacgggctcaagccgaaggtccgcaccgccttcctcctggcacagtgcgaagacctcagccaccggcagatcgccgaacgcatgggggtttcccagcgtagcgtcgagcgctacgtggccgaggcgctgtaccactgctacctgctgcgctacggcgaatgagcggagccgtggacgggacgcgcggtagggtcgacgaagcggtggtcaggcaggccatccactggctggtccgcctgcgctcgcagccgggcgacgatcgcctgcagcgcgcctgcgcggcctggcgcgcggagcacggcgagcacgagcgggcctggcagcaggtcagcgcgctcaacgaagaactgcacggacgcttcaaggcgctgcccggcggggtcgcctacggcaccctggacagcagcgcgcagcgcctgcagcggcgccaggcgctgaaactgctgtcgctgctggtggctggcggcgccgtggcctgggtcggtcgcgacagcctgccctggcagcgcctgagcgccgactacagcaccgccaccggcgagcgacgcagtatcgagctggtcgacggcacccgcctgcaactgaacaccgacagcgcggtcgacgtgcgctacgacgccggccagcgcctgatcctcctcgcccgcggcgagatcttcctcgccagcggcgccgatacgcaatcgcccacgcacaggccgctgcgggtacgtaccgcgcaagggctgttcgaggccctcggcacccgtttcaacgtacgcctgcaagatgccgccacctgtctcagcgtcagcgagggttcggtgcgcatcgatgccttcggcgcgcgtccgctgcaggctccggtggccgaggcggggcagagctatcggatcgccgccgacggcgtgcggcgcctcgaacggccgcagatggacgccgtggcctgggccgatggcctgatcgtcacccgcgacatgcgcctggccgacttcctcgccgaggtcggccgctaccgcaacggctacctcggctgcgccgcggaggtcgccgacctgcgtctgtccggggtctaccgcctggacgacaccgacaagctgttgcaggtgctcgcgcggaccctgccggtgcgcctgcagcggcatacccgctggtgggtgagggtggtcgccgcctgagtcgcgccggcggccgcgtggacgcttgcttccgcccggagcgaaacgcactgaaaattattttcattatttttgtcggctttccgcgactggtccggctttaccgattgaacacccttcaacgactccaacggatcccgttcatgaccgccaccgccgtcgtcctccgcaatgccccgtcgtccctcgatttcccccgcgcctcgcgcctgagccgttcggtgcgcgcggccctgctgtcgctggccatggcggccggcgcggcgccgctctgtgcctcggccgccgaagcggcggcggaacaggcgcggccctatgcgatccccgccggacagttgggcgacgtgctcaaccgcttcgcccgcgaggccggcatcaccctctcggccactccggcgcagaccggtggctacagctcccaggggttgcgcggcagtttcaccgtgcagcagggcctggcccggctgctcgccgacaccccgctggaagcggaagaccagggcgacggcagcttcgtcttgcgcgaggcgccggcaaaggacggcgatgtgctgaacatgcaggcggtggaggtcttcgccctcggcaacaacctgggcagcaccgatggctacctggccacccatagccagatcgccaccaagaccagcaagccgctgctggaaaccagccagaccgtctcggtgatcacccgcgagcagatcgacgacaccgcctccaagaccgtacagcaggcgatgcgctatacccccggcatcttcaccggccaggtcggcgcctccaaccgctacgactacgtggtgatgcgcggcttcgccgacaacagcgtggacaacatctacctcgacggcctcaaggccatgggcgacagcggtaccttcagctcgatgcaggtcgacccgtacttcctcgaacgcatcgatgtgctcaaggggccgtcctcggtgctctacggccgtagcctgccgggcggcctggtggcgctgaccagcaagaagccgttgtacgaggactaccgccagatcaccggcagcatcggcaacatgggccagaaggagatgggcttcgatttcagcgggccgctcgacgaggagaagcgcatcgcctaccgcctgatcggtctcggcaagggctcggacacccagttcgatcacgtcaaggaggagcgctacgccatcgccccgaccctggccatcgacttcagcgacgacaccaccctgaccctgcaaggctacctgcaacacgatcccaacgggggctaccacggcggcgtaccggccgacggcaccctgtcgcaccacaacggccggcacatctcccgcgagttcttcgatggcgagccgagcaaggacgacttcgaccgcacccagcggatgttcggctaccagctggagcaccgcatcgacgacgtctggtcggcgcggcagaacttccgctacctggactccgacgtcgacctgtcgcaggtctacgcctacggctggagcgccagcgagccgaacaagctgaaccgctacttcagcggcgcccgcgagcacctgcaggcgtatatcgtcgacaacatgctgcaggccgaattcgccaccggcgcggcgcgccacaccctgctcaccggcctcgactaccagcgccggcgcaccgtggtcgactggcgttccggctcggcctcggcgctggacgcgttcaacccggtctacggcgacgacgccatcagctatttcccggacgacaaccacacccgccgcctggagcagaccggcgtctacctccaggacctgatcgacatcgaccagtggcgcttctcgctcggcctgcgccaggactgggtcagcgtcaccgacaagaaccgcagcaccggcagcaaggccgacgacgactgggagaaattcaccgggcggatcggcgcgctgtacctgttcgacaacggcctggcgccctacgtcagctactccgagtcgttcaacccgaacgcctattccgacgcctccggcacgcccctggcgcccaccgagggcaagcagtgggaactcggcctgaagttccaggcgccgggcagcaacagcttctacaccgcctcgctgttccatatcacccaggaaaacgtcgcctccaaggaaccccaggacaacttctacacctcggtcggcgaagtgcgctcccaggggctcgaactggaggcccatacccagctcagcgacaacctgaaactgctcggcagctacacctacaccgacatcacctacaccaagtcgctggacggcaaccagggccatacgccgaaccaggcgcccaagcacatggcttcgctgtgggccgactatgccttcgacgccggcccgctcagcggtctgagcatcggcggcggcgctcgctacgtcggcgagacctgggcggacaaggaaaacaccttgcgggtgccggactacaccctggtcgacgcgcggatcggttacgacctcggcaagctcggcctgaaaggcctggacgtcagcctcaatgccaacaacctgctggacaaggactacgtggcgtcctgctacagcctggacttctgctacttcggcgagaagcgcaacgtcaccgcgacggtgaactaccagttctgaccgtccacccgggccccggcgccagcgccgcggtaccggccaagcagcccggcgcgcgacgtacgcgccgggcattcgccggcgtcgccggccgtaccctggttacctggagcccccatgcgccccgtcctggtcctgctgcaccgctatgtcggtctggctaccgcgctgttccttttcctcgccggtctcaccggcagcctgctggccttccatcatgaaatcgacgaatggctgaaccccggcttctacgccgtgggcgagggcggcgagcgcctttccccgggcagcctggtgcaacgcgtcgagtcacgctatccgcgacaactggtgtggtacatggagtatcccgaggcgggcgggcatccggcgttgctcgccaccgtgccgcgcgaggccggcgccaaggtcgagcacgacgtgttctacctcgacccggtcagcggcgaggaagtcggcaagcgcctctgggcggcctgctgcttccagccggcgaacctggttccctgggtcctggagttccaccacaacctgaccctgccggggaactggggcctgtacctgatgggcggggtggcgatgttctggttcctcgactgcttcgtcggcgcctggctgaccctgccgcgcggccggccgttctggagcaagtggacgacagcctggaagatcaagcgcggcaacgcctaccgcttcaacttcgacctgcatcgcgccggcggcctctggctctggctgctgctggcgccggtggcgctgagcagcgtcgccctgaacctgccgagccaggtgttcaagccgctggtatcgctgttctcgccgatcgaaccgagcgtctacgaggcgcgcgggcggctgcccagggagcaactgggggagacccgcctggactacgaccgcaccttccagttggccagcgtcgaagcggcgcggctgggcatcgccgagccgatcggcgagctgtactacagcttcgaatacaacttcttcggcgccggcttcggcgaccacgacgaccccatgggcaagtcctggctgttcttccacggcagcgacggccgcctgctcggccaggaagtcgccgggcagggcagttggggagagcgtttctaccgcttgcagtacccgatccacggcgggcgcatcgccggcctgccgggacgcatcgccatcgccgccctcggcctggccatcgccgggctgtcgctgaccggtgtctacatctggtggcgcaagcgccgggcgcgccactggaacggccgctagccggctgttagtctggctgcctcccacaccaccagaggatggacgaatgaacgcaaggatcgccgcattgggattgctcctgcccctggccgccggcagcgccgtggccgcggaggagggcagctcggtcaaggatgcggccaaggccgcggtgtcctcggccatcgagactggcaagaacctcctcggcggggtcagcgagggcatcaccagcggccgccagtcggcccagggcgccgatggcgccaaggtggtctccgacaacgccggcttcgccgagatcggccaggtcgaagtgctcaagaccgagccgcgcgaccagcaactggccgtcaccctcggcttcaagaacgacggcgacgccaccgtgcgcctgatcaacctgacccagaccggcgcgctgctggtgatcgacaacgacggctactccaacgccctggtcgccctcgccaaccccgacgacgtcaccgtcccggccaaggccggcatccgccagaccttcgtcttcgaaggcggcgcggaagggatcaaggcggtgcgcctgtggggcaaggacctgccggtgaagtgaattcgagtctgcgtcaaagcagccccgccttggcggggcttctttctgccgggccacgagcgcaaataatcagctcaccagaacccggccgagcgctgcctggagaccgataggtccttcccattacgaaaatgacgacatcgcatcgatcctgaaacgtccgtacagccaggacgacgcaatgaaggcaaagtgccattccctcctgtccctgtttggattagcattcctacttttggactaatccccccctcaacacgcccatgtcgtttagctatgcggtggatattgaagggaactcgcaggacatcggatgttgcgttctagctatcgagcggttgtcgctggcttggttttactgccgctgcttgccagcgccgcccccttcacctcccccggcgaccgcgacctgatccgcgaccgccagcagcgcctgctggacgaacagcgcaagcgcctggaggaactccagcaactgcccggcaagggagcgcccgccgctgcggatgcctccggcgacgacgagcgctgcttcgagatccgccgcatcgagctggaaggcgccgggcacctcgacgaaagcgcgcgtcgccagttgctggcgccctaccaggggcgctgcctgggcgtcggccagctcaatgcgctgctcaaggccgtcaccgaccattacctggatcgcggctacgtcaccacccgcgcctacctgccacagcaggacctggcctccgggaccctgcgtatcatcgtcgtcgaaggccgcctggagggcctggacagctccgcgctggccagcccgcgcgaactggcgatgagctttccgggcaggaccggcgagctgctcgacctgcgcgaactggagcaactggtcgaccagttgagtcgcctgccgtcgcgccaggcgcaactggagctggtgcccggcagcgaggtcggcggcagccgggtgcgtctcaagggtgagcgcgacaagccctggcgggtctccgccacgcgcaacaacgacggcgacgtcagcaccggcgagcagcagatgggcctgggtctggactgggacagcccgctgggcctggccgaccagctcaacctgcgcgccaaccgcgacgcggtgaccgaccgctggcgccattccgacagccagagcctgttctacaccctgccctggggttggtggactttcacctacggctacagccagagcgactaccgcacgcgcaacgaggccagcggcttccccttcaagctcgatggcgacagccgcagccaccagttccgcgccgaacgcgtgctgcaccgcgacggcgtgagcaagaccgccatgagcctggggctcagccaccagcgcaccaacaactatgtcgaagacacccgcctggaagaccagagcacgcggatcaccgagacccagctcggcttcaaccatggccggcggatcggcagtggcttcgtcaacctcgacctcggctggcagcagggcatcggcgcccttggcgcgcagggtcgcggccacccgcaggcgggcgatccgaatgcgcgctacgacaagtacagcctgaccctcagctacctgcagccgttccagctatggggcgagcgcttcagcttcgacagcctggccaccgggcaaaggagcgaggacgtgctgttcagcccgcagcgcatcagcctcggcggcaacagctcggtgcgcggcttcaaggaccagaccctgaccggcgacagcggcggctactggcgcaaccagttgcgctggcggcgcgcggtggaatgggcgccgctgcggccctggctgcaggaatacggcgtggccttcgcttacgacgtcggcgtgatccgccacgaccgctacaacgacggcgccagcgggcgcatgagcggcaacgccatcgaactggatgcccgcggccgctatttcgccgccagcgtcggcttcgcccgctcgctggagcggcccagcgccatcgagcggcgcgagcacccgatctatttccgggtcgacgcgttcttctgaagacgcggcgacctcctgaacgctttaggaaagcgcctacctgcatcgaggccctttccttggaaaaccttgcttaacctcgccgggcccctatccgccaaggagtaacgatatggacatccgcagcccgctgaaccagtgcatcgccctgtccctggccggcatcctgttcctcaacccgatcgtcgccgcggcggcggggctggcgctggacaaggccgccggcggcaacaccggcctgggccaggcgggcaacggcatgcccatcgtcaatatcgccacgcccaacggcgccgggctgtcgaacaaccatttccgcgactacaacgtcggcgccaacgggctgatcctcaacaacgctaccggcaagacccagggtacccagctcggcgggatcatcctcggcaaccccaacctcaagggccaggcggcgcaggtgatcctcaaccaggtcaccggcggcaaccgcagcaccctggccggctacaccgaggtggccgggcagtcggcgcgggtgatcgtcgccaacccgcacggcatcacctgccagggctgcggcttcatcaacacgccgcgcgcgaccctcaccaccggcaagccgatcatggacggccagcgcctggagcgcttccaggtggacggcggcgacatcgtcgtcgaaggcgccgaactgaacgtcggcaacctcgaacagttcgacctgatcacccgcagcgccaagctcaacgccaagctctacgcgaagaacctcaacatcgtcaccggccgcaacgacgtccaggccgacagcctgcaggccacgccgcgcgccgccgatggcagcgagaagccacagctggcgatcgacagctcggcgctgggcgggatgtacgccggggcgatccgcctggtcggcaccgagcagggcgtgggggtgaagctggccggcgacatggccgccagcggcggcgacatccgcatcgacgccagcggcaagctgagcctggcccaggcctccagccagggcgacctgaagatcgcggcccaggccgtggagctgaacggcaagacctacgccggcggcagcgccgagattcgcagcgcggaggaactgctcaaccggcagagcctggcggcgcgcgaacgcatcgcgctggaggcggcgcatatcgacaacgccggggtgatcgaagccggcgtcgagccagacgagcggcgcaacgcgcgcggcgacctcgagctgcgcagcggcaccctgcgcaacgccggcagcctggtggccagccgcgcgctggaagcgaaggcgagccaggcgctggacaaccagggcggcagcctgaagggggcgaccgtccgggtcgacgccgggcacctggacaaccgtggcggcaagctgctcgccgagggcgaactgcgggtcgaggcgagcagcctggacaaccgccaggacggcctgttgcagagccgggaccgcgccgtggtcaagacccgtggcgatctcgacaaccgtggcggccaggtcgtcggtctgaacgagctgcaggtccaggctgccgcactggacaatcgcagtgccggtctcctttccagcaagggagacatggacatcgaggtcgctcgtctggacaacagtgcgggcggcaagctggtcagcgagcgccgtacgctcttgaaggcggatcggctcgataatcgcagcggtcgcattgtcgccggccaggatctcgacttgagctctcggttgatcgacaaccgagcgggcgatatctccagcacgtcgagggtggtggcgagcgctcgcgaacagttggacaaccgcggtggcaagatcgttggtgacagtggtctggacatcacaacgccacgcatgctcaaccaggacaagggggtactcgccagccgcgatgggctgcgcctgagcgctacggagttgttcaacggcgggggaggcctgctgtccagccagaagggtatcgacgtctccctggccggtgcgttcgataaccaggccggcagcctggacagccggggcttcctgacggtgaagtcagcctggctcgacaaccagggcggtacgctatccagcgcaggggcattggcagtgaccagccagggcgccctgaacaatcagggcggcagactggcgagcgacgccggacttagcttgagcagcgccagcctcgacaacagccaggccggtgcgatcagtggcaagggggccgtggagattcgtaccggcaacctgaacaacagccggaaagccagtatcggcagcgatgcgggactcaccctggtcgccgctcgggtagacaacagccaggcgggccggatcgccgccaagggtgtgatcgatgcggatctccaagggctggaccagcatgacaggggcaacctggtcagcgataccggcatcacgctcgatctgaacaagggaagcctggtcaatcgcgctcaaggcctgatcgccacgcctggcaccttgctcctgcgccaactcggcgtggtggacaacagcggtggggaaatctccagcgaccgcgcgttcactcttgccacctccgcgttgaacaaccaggggggacgcctgctcagcggcggagccctgaccttgcgtatcgcgcaggccctggacaacagcctcgaggggattgtctccggtgctggaggtctggatatccaggcattcgtcctggacaaccgtagtggctccatcggcagcaagggcgccatcgatatcggtgtgacccgcctggaaaacgacgctggcacactgatcgctgaacgcggcctgaagctggtagccgatgaggcgaacagttccaaggggcgtatcgccgccaatggtagcctgcatgccaaggttggcacgctgagccagaagggaggagaactgaccagtcaggactcgctgactctcgacgtgggcatcctaaacaataactctggccgtatcgctggcaaccagggcgtggacatcacggcccggcaggtggacaacagcgtcggcgagattgccagccagggcgtggtggcgctgaacctcactgagcagctggacaaccgtggcggcaagatcgtcggtgacagtggtctgggcatcaccgcgccgcacgtgctcaaccaggacaagggggtactcgccagccgcgatgggctgcgcctgagtgctacggagttgttcaacggcgcggggggcctgctgtccagccagaagggtatcgacgtctccctggccggtgcgttcgataaccaggccggcagcctggacagccggggcttcctgacggtgaggtcagcccggctcgacaaccagggcggtacgctatccagcgcaggggcattggcagtgaccagccagggcgccctgaacaatcagggcggcagactggcgagcgacgctggacttagcttgagcagcgccagcctcgacaacagccaggccggtgcgatcagtggcaagggggccgtggagattcgtaccggcaacctgaacaacagccggaaagccagtatcggcagcgatgcgggactcaccctggtcgccgctcgggtagacaacagccaggcgggccggatcgctgccaaaggtgcgatcgatgcggatctccaagggttggaccagcatgacaggggcaacctggtcagcgataccggcatcacgctcgatctgaacaagggaagcctggtcaatcgcgctcaaggcctgatcgccacgcctggcactttgctcctgcgccaactcggcgtggtggacaacagcggtggggaaatctccagcgaccgcgcgttcactcttgccacctccgcgttgaacaaccaggggggacgcctgctcagcggcggagccctgaccttgcgtatcgcgcaggccctggacaacagcctcgaggggattgtctccggtgctggaggtctggatatccaggcattcgtcctggacaaccgtagtggctccatcggcagcaagagcgccatcgatatcggtgtgacccgcctggaaaacgacgctggcacgctgatcgctgaacgcggcctgaagctggtagccgatgaggcgaacaattccaaggggcgtatcgtcgccaaggatgatctgcgtgccaaacttggtgcgctggtgcagaacgggggtgagctgacgactcagggcgcgctggccctcgacgccgacaaagtcgacaacggcgctggtcgcatcgccggcaaccgaggtgtggtcatcgatgcccggcaggtggacaaccgtgccggcgagattgccagccagggcgtggcgacgctgaatctcactgagcaactggacaaccgtggcggcaaagtcgttgctgacagtggtctgggcatcaccgcgccacgcgtgctcaaccaggacaagggagtaatcgccagccgcgatgggctgcgcctgagtggtaccgaattgttcaatggcaatgccggactgctcagcagtcagagacatatagaggtcactctggacggcgtgctggacaatcagggcaagggcgcgctgctcagcgacggtaccctgacggtgagcgccgggcgcatacacaaccaggacgccactctgtccagcgccggtgcgctgagactgagcagccaggaggcggtggacaaccgtggcggcaagttggtgacggactccagcctgcgcctgaccagcgccagcctggacaacagccgatcagggatcatcagtgccaacgctgcggcggagatccataccggggttctgaacaacagccagaaaggcaatcttggcagtaatgacgggctcggcctgattgctactgaggtggataacagccaggaaggtcggatcactgccaaaggcatgatcgacgcaaatatcaagggactcgatcagcagggcaaagggcggctggtcagtaatgccggcatcatactcgacctgaacgagggaaccctggccaatggcgctcagggcctgatcgccacgcctggaaccttgctcctgcgccaactcggcatggtggacaacagcggcggggaaatttccagcgaccgagccttcacactcaccacctccgcgctgaccaaccagggtggccgcctgcgcagcggcggtgtactgacgttgcgcatcgcccaggctctggacaacagcctcgaaggtgttctctccggcaccggaggcctggatatccgggcgcttgccctggacaaccgcagtggctccatcggcagcaagggcgccgtcgatatcgacgtgtctcgtttggaaaacgatgacggcgacctgcttagcgaaggtcgtctgaaactgactgccgagcgagcgaacagtgtcaggggacggatcgcggccaggggtgacctgcacgccagcgtgacagcctttaaccaggcgggtggcgaattgagcagcgagggtgcgctgatgctcgaggccgatagcctcgacaaccgcagcggcggtctggtcagtgctgatggcaacctgaccgtttccgcccggaggatcgacaaccgtgcgggcgaaatcgccagcccgggccaggtgacactggacgtcgccgagcagttggacaaccgaggcggcaaggccatcggcgatagcggacttcgcctcgtcgcgccacgggtactcaaccaggacggcggggtactcgccagtcgtgatgggctgcgcctgaatggcgccgaactgttcaatggcaacggcggcctgctcagcagccagcaaagcatcgacgtcattctggacggcgtattgggcaatcaggcgggcagcttgagcagccagggacgcctgagcgtgaagagcggtcggctggacaaccagggcggtgcagtctccagcgccgggaccttgtcgctttccagccagggtgcgttgaacaaccaggggggcagggtggtcaccgacgccggtgccgtcctgcgcagcgccagcctcgacaatagccagggcggcatcgtcagcgccaagggggccgcggagatccgtactggcagcctcaacaatagccagaagggcggcataggcagcggtgccgggctcgcgctggtcgcggacctggtggacaacagccagaacggccggatcactgccaagggtgcgatcgatgccaacctgaaggggctggatcagcagggcagcggcaggctggtcagcgatacggccatcgcgctcgatctgcgcgggggagaactggtcaaccgtgctcagggcctgatcgccacgcctggagccttgctgctgcggcaactgggtgtcgtggacaacagtggcggtggcgagatctccagcgatcgaagctttaccctcgccgcgaccgcgctgagcaaccggggtggccgcgtgatcagcggcgactccctgaccctgcgcatcgcccaggcactggacaacagcctccaaggcgttctttccgcaagcggagggctggatgtcgctgcactcgtcttcgacaaccatagcggcatcgttgctagcaagggcgatacacacatcggggtgaaccgcctggagaacgaggcaggccgcgtggtcagcgaaggcgccctggatctgaccgccaagcaggtgagcagcgccaaggggcgcattgccgcgaagggcgatctgcaggtcacggttggcaccctcgagcagcagggtggagaactggccagtcaggggacgctgactctcgacgccgatagcctggataaccgcaatggcggcctggtgagcgccgatggcggggtcaccgccgaggcacgccagatcgataaccgcggtggggaaatatccagcgtggccaaggtggctctggctgtccgggaacaactggacaaccgggggggcaaggtgatcggcgacagtgagctgagcctaaccgtgcagcgcctgctgaaccaggccaagggtgtgctcgccagtcgcgatggattgcacctggacggcgctgaactgctcaatggcgatggcggcctgctcagcagccaacgcctggtggatgtaacgctcagtggtgcattggacaaccaggggagcggtgcactggtcagcgaagggtcgctgacagtgaaggccgaccaggtcaataaccaggcggggactttctccagtgcgggtagcctgctcgttaccagccggggcgagttgaacaaccagggtggcaggttggtgaccgatgctggagccaccctgaacagcactggcttcgacaacagccgtgcgggcctggtcagtgcgaaaggggctgtggccattcgtaccggagccctgaacaacagtcagaagggatccattggcggcaatacgggcgtcaccctggtcgccgggttggtcgacaacggccgggaaggacggatcagcaccaagggtacgctcgacgccaacctgaaagggttgcttcagcaggggggaggctcgctggtcggcgagcgcggtgtcaccctcgacctcaacggtggcaccctggacaaccacgacctcggtctggtttcaacgcctggcgcgctcctgctgcgccaactcggcatggtggacaacagcgtcggcggagagatatccagcgaccgtgctttcaccctcgccgccaacacactgaacaatcagggcgggcggctgatcagcagcgaagctttgaccctgcgcatcgccaagacactggacaacagtctcaaggggcaggtcctggcgaccgacggactggccatcgagtctcaggtcttggacaaccgtgcgggaaccatcggcagcaagggcgatgcccgtatcagcgtgaccagcctggacaacgccgaacaaggcagcctggtgagtgaaggccgcctggagcttgtagccgaccaggtgagcaacggcaaccaaggccgtatcgccgccagaggcgtgctggaggcggcggtcggtacgctgctccagcaaggcggcgaactggtcagccaggggagcctggaccttcgcgccgacacgctcgacaacagccagtccgggctgatcgccgcgaatggcggcatcgctatcgaggcgcggcaggtcgacaaccgcgccggcgagatttccagcacctcgaaggtcgccgtgaacgcccgcgagcaactggacaaccgcggcggcaaggtcatcggcgacagcggcctgcgcctcaccgtgcagcgcctgctgaaccaggccaagggggtgctggccgggcgcgacggcctgagcctggacggcggcgaactgttcaacggcgacggcgggcggctcgacagccagaacagcctgagcgtgagcctcggcggcgtgctggacaaccagggcggcgcgctggtcagcgaaggcagcctgacggcgcgcgccgcgcgcctggacaaccgtggcgggaccttctccagcgccggtgcgctggcgctgaccagccaggccgcgctggacaaccagggcggcaggctgctcagcgatgccggcgtgacgctgaagggcgccagcctcgacaacagccgttccggcgtgatcagcgccaagggcgcggtggatatccgcaccggcgtgctggacaacagccgcaacggcggcatcggcagcaacgccggcatcaccctggtggccgcccggctggacaacggccagcagggccgggtcagcgccaagggcctgctcgacgccaacctgaaaggcctcgaccagcgcggaggcggcgtcctggtcagcgaaaccggcgtcaccctcgacctcaatggcggcacgctggtcaaccgcgacggcggcctgatcgccacgcccggcgcgctgctgctgcgccagctcggcgcggtggacaacggcgccggcggggaaatttccagcgaccgcgccttcaccctcgccgccgccagcctggacaaccgcggcgggcgcctgatcggcgccgccagcctgaccctgcgcatcgcccaggccctggacaacagcctgggcggggtgatctccggcgccgccggcctggacatcgcggccgctcgcctggacaacagcgccaagggcaccctggccagccgcgccggcatcgacctgcgcgtcgacggcgcgctggacaaccacgccgaaggcaccgtctccggcgcccgcctgacgctcgccagcgcctcgctggacaacagcggcaagggcctgctctccggcaacgccggcctgagcgtcgccactggcgcgctggacaacgccgagggtggccaactgatcagccagggcgtcctggacgtcagcagcgccgacctcgacaaccgtggcggcgccctcagtggcaagcagtcgctgcgcctgagcgccgccaacctggacaaccgtggcggcctgctcaccagcgacggcgaactggaactgacggcagggcgcgtcgattccgccgacggcggcgaaatctccgcccggggcgacctgcgcctgacggtcgagcgcctggtgcaacgccagggccggctggtcggcgagcgcggcgtcagtctcgacctgcggggtggcgacctggataaccagggcggcctgatcagtgcccgcggcccgctgagcatcgagcggctgaacgtcctcgacaaccgccagggcggcgagatttccagccagcagggcttcgagctgctggccaggcgcatcgacaacggccagcaggggcgcatcatcagcgccgggaaactgcgcctggacgccgacgcgctgggcaacgccggcgccggcctgctctccggatggcagggtctgacggtgacaggcgggagcctggacaacagcgccggcggcaccctttcgagcaaggacggcgagctggccatcagcctcggcggcgcgctggacaaccacggccagggcgccctggtcagcaagggcgcgcaacggatcgacgccgccagcctggataacgcccagggcatcgtctccggcgaaagcgacgtgaccctgagcatcgccgggaagctggacaacggccagggcggcctggtctcggcgcagcgcgcgctgagcttcgagcacgacgatacgctgctgaacaacgccggcggccggatcaacggcggcagcctgctgctcaagggcgccagcctggataacagcgacggccagttgatcagccagggccggctcgacgccatcctcggcggcgccctggtcaacaccggcgcggcgcgcctggccagcggcggcgacctgctgctgcgcagcgccagcgtcgacaaccgcggcggcaagctggtcagccaggggctgctggagatcagcgccggcagccttgacaacagcgcctccggcaccctcgccagccaggccggcatgaacctgcgcctgggcggcggcgccctgcgcaaccagcaggacggcctgatcttcagccaggccggcgccctcgaggtgcaggccggcagcctggacaaccgccagggcacgctccaggcccagggcgacaaccggctgcgtatcggcggcgcgctggacaaccagggcggccgcctggacagccgggccggcaacctcgacctgcagagcggcagcctcgacaacggcgccggcggcgtgctcaacagcgccaagggttggctgaagctggtcaccgggctgttcgacaacagcgccggcgtcacccaggcgcagtcgctggagattcgcgccgggcaaggcgtgcgcaaccagcagggccacctctcggcgctgggcggcgacaaccgcatcgtcaccgccgacttcgacaaccagggcggcggcctctacgccagcggcctgctcagcctcgacggccagcgcttcctcaaccagggcgcggcggcgggtcagggcggcaaggtcggcgccgggcgcatcgacttcagcctggccggcgcgctggccaaccgcttcggccagttggaaagcgaaagcgagctgcacctgcgcgccgccgcgatcgacaacagcggcggcagcctgcgcgccctcggccgcagcggcagcacgcggttggtcgctggcggcctgaacaacgcctacggcgtgctggaaagcgccaaccaggacctcgacctgcaactgggcagcctggccaacgccggcgggcgcatcctccataccggcaacggcaccttcggcctggattccgggcaggtgatccgcgccggcggcgaactgaccaccaatggcctgctggacatccgcgccagcgaatggaccaacagcagcgtgctgcaagccggacgcctgaacctggacatcggcaccttccgccagacggccgagggcaagctgctggcggtgcagtccttcactggccgcggcggcgactggagcaacgacggcctgctggccagcgacggcagcttgcgcctcgacctgagcggcggctaccgtggcaacggccgcgccaccagcctcggcgacttcgccctgaacgccgccagcctcgacctcggcaatgccgccagcctcgccggcggcgccaatgtcacgcttggcgccggcaacctgctggtcaaccgtgggcggatcaccgccgccggcgacctcgtggccagcgccgcgagcctgaacaactacggcaccctgggcggcggcggcaacctgcgattgaacgcgcccgccctgctcaacgagcgcgggttgctgttcagtggcgccgacatgaccctgcgcgccggcgacatcaccaacctctacggggatgtgtacagcctcggcaggctggatatcgcccgcgacgattcaagtggcaaggtgagttccttcaaaaatatttcagcgagtgttgaaagctcaaatgacctgagattacttgctgaggtagttgagaataaaaaagaaatttttgatgtttcgtctgagtttctttctggggctattggagttcgttgctttgactgttcggcagtaggagggaaagaggacaagtttgccagtcatttggtcttgttggaaaattacaagactcagcttctaaaggattctccctcctcaaatatcacctcaggagggaacattttcatcttggggggacggctcaagaatcaggggagcaccatagcggcggcgggtgatatttctatttcggctcaggatttcgctaacgaagggtatgtgttgggtgagtactccgttaggaaagcattggatttcaactacagctatgaggcgagagttgaggtttggcgaaaaattatggagtacaactccataaatgaccttgcctatgataatggcaagattgaatatagtaatttcggtggtgctattcatttctggaataaaaattgggatgaatccattgtggattcagtatatttccgaactggcggaagggatggttactggcacgcaggcttcgggaccattgttatagatgatatagccagggacaaatttgactatatctctgttgcaccggcttatgacccgtctcgtggagccttaccaccagattttctcagaaatgcaaaagtattcgatgagcttactatatcgaaaagtgatgttgctcccgtcgctaatgcagttgtacaggctggaggcaaagtctctatcaatgcagagaggtcactgcagaacagtattgttcgagaagggcagcccatttctcggggggtagaaaagaacctgctaacggggctgtccgggaacacctccaacgttgtggtgctgagccaggcacttccgcctgatctagccaggaagcagatcaatccgctcaccctaccgggcttcagcctgcctcaaggccagaatgggctcttccgcctggcgtcccaaggagcccaggtgaaccaggcaagtggtgctctgaaatccgccagcgatctcacccagagcggccatggcgtatctgtatccgcacagacaggcagtggcgcaagtggctggagtacccaggcgcgtcgtgtcggcgatgatcgtgtcacctcgcttgccggttccgcctatcaaggccgggtagctgaggctatcgatgcgctacgggcttccgcgccaatctcgggcgacgggggaaacactggccgtttccaggccggtgagcaccaggcgaccacgggactgggtggactcgtcgagggcaatgcatcgggtcacagcggcaatggcgtcatcctcgccgatctgcgcggtggtctaccctcgttctcaagccttcccgcggctgatcgtattcaaagcacagtgcccggtcacgatgggaatggaactattctcgccaattggcagggtgcgcaggcgacggtccaggcctcgccttcgacagtgcgtgtagagggggtagtctccagtccaggtggcaatggcagcatccttgccgatctgccggctgaacagtcgtcggtgcaggcactgccttcggccgttagggctcagggcagcctgcctcgcctcgaagagcggagcgcccttcttgccgagcctccggttgggcagccggcgttgcaaaccctgccgtcggttgcgcgcgttgagggcgtgcccagcaatgccacaccgagcaacagccacaagtatctgatcgagaccaacccggcgctcaccgagctgaagcagttcctcaactcggactacctgctcggtggtctgggtatcaatccggacgatagcaagaagcgcctgggtgacggtctatacgagcagcgcctggtacgcgaagcgatcgtccagcgtacggggcagcgcttcatcgccggattgaacagcgacgaagcgatgttccgctatctgatggacaacgccatcgccagcaaggacgtattgggactgacccctggcgtcaccctcagcgccgcccaggtggcggcgctgacccacgatatcgtttggctggaagaagtcgaggtgaatggcgaaaaggtcctcgcccccgtggtctacctggcccaggccgaggggcggttgggcccgaacggcgcgctgatccaggggcgcgacgtgaacctgatcaccggcggggacctgaggaacgccggtaccctgcgcgcgcagaacgacctcagcgcgacagccggcaacatcgacaacagcggcctgatcgaggccggcaaccgcctcgacctgctggccagcggctccatccgcaatgaccagggcggcatcattgccgggcgcgaggtaagcctctctgcccttaccggagacgtcatcaatgaacggacggtgacccagcaccagtcctcctacaggggaaccggtaccactgaggcatttgccgatagcgccgcgcgtatcgaggctgcgcagaagctgaccgtttcggcaggacgcgatgtagccaatattggcggtgtcatcgacagcaagggcgacctcgccttgcaaggcggcagggatgtcctggtttcggctgcggtagcggagcggggctggacggcaggaagccaggcataccagacccagacgacccagatgggcgccgaggtcgtggcggggcgcgatatcagcgtcagcgccggacgcgatatcagcgtcgtgggcagccgcatcgacgctcgtcgcgacgtgacattcgaggcgggtcgcgatgtgggcctggtcgcggctgccaacgaagagcatgcctatggcaagaccaagaaggtcactttccaggacgacaagatcacccagcaggccactcgcgtggacgctggcggcgacctggcgatcaatgccggacaggacctgcggctggtcgcgagccaggccagcgccggcgacgaagcctacctggtggccggcgacaagctggagctgctggccgccaacgacagcagttactacctctacgacaagaagagcaaaggcagcttcggtagcaagaagacccggcgcgacgaaatcaccgatgtgacggcagtgggcagccaaatatccagcggcggcgacctcaccctgctcagtggcggcgaccagacttaccagggcgcgaagctggaatcgggcaacgacctggccatcgtcagcggcggcgcggtgaccttcgaggcggtaaaggacctgcaccaggaaagccacgagaagagcaagggcgacctggcgtggcattcgtcgaagggcaagggtcagaccgacgaaaccgtgcgccagagccagatcgtggcccaggggaatctggcgatcaaggccgtggaagggctgaagatcgacctcaagcatatcgaccagaagaccgtgagccagaccatcgacgcgatggtgcaggcggatccgcaactggcctggctgaagcagatggagcagcgcggcgatgtggattggcggcgcgtgcaggaactgcatgacagctggaagtacagcaactccgggctgggcgtcggcgcgcagttggcgatagcgatcgtcgtgacttacttcacggcgggcgcagccagcggggcgattgcaacggccggggccggaacctccatggcaggcgcgaccgcagccgctaccgctacgacttcggcgggctggttgaacgcggcaggtaccgcagcgctcagcggcgtggccagcaatggagcgatcagcaccatcaacaaccggggaaacctgggggatgtcgtcaaggacgtgacctccagcgatgcgctgaggggctatgtagtcgctggcacgactgcggggctgactgccggcgtctacgacaaatggacctcgacccagaccggcacctcgaccgctctaccgaacaccggggccgtggcgcccgccgcagggttgggcacctggcaaggcgtgggccagttcacctcgaaccagttgctgcagaatggtacttcggtgctgttggaccgggcgctgggcggcaagggcagcctgggcgatgcgttgcaaaacagcctggcaaatgcctttgcggcctacggcttcaagctgattggcgacaccacccatggcgtactggacgacggcagcctcggcaagatcggcttgcacgccctgatgggaggtctggccgccgaagcggtcggtggcgatttccgtaccggagccctggctgcgggagtcaacgaggcgctggtggatagcctcgccaagcaatacgccagcctgcccatcgatgacaagaagggcctgctgaccatgagttcgcagttgatcggcatgctggcggcttcgacgcagggcgatgcggacgccaagagcttgcagacgggagcctgggtggcggggaatgccacccaacacaactacctcagtcattggcaggaggagaagaagcggcaggaggtcgatggctgcaaggacaaaccgctctgcaaaaccggaatagaagccaaatgggcaattatttcggcccagcaggatgtcggtatcgtcgtaggtgttggaggaggcatcggtctttcgacagctgaaaccgcagtgggtgtttatgagctggtcaagaactggagggaaacctatgcagctctggagcagttggccacttcgccagagttccggcagcagtttggcgataactacctgaaggggctggaggagcgcgccgcattcttgacccaggcttacgaggatgccggctggcaaggttcggtcacagctggtgtcgagggcggtaggttcgctgcggaacttgttggcgttctgacggcagtgaaaggtggcgcgcagataaccgccaagctgccaacagcagccaagaacctggtcaacgcgattgcggagtcacctgtttccggtagtatgagttcgcagctcggggcagtgggggacttgggtcggctgggtgggggtgcaaaaggaactgctaatttcccggaagggatgagcttcaatcccaacatcaagaatcacctcagcaattttgatggcttgacgcagaagagcgggattagcggcacccataacctggatgctttcaatcaggctgcgactacgaatggtgtgaaggtactcagcgaaacgccaacttccgttgcggggattaccaccgtcagataccaaatacctgcatatgatcgggcaggaaatattgttggatttaaagacaaaattttcccgaaaactgtttatgatccgaaaatatttactgatcagggaatccttgatctagggcagcaggccgcagctggcggctataaggacgcgctatctaaaggggtgagtcaatatgactctgttgccgggggtatcacttttagggtgtatttagataagttcacaggaacggtgacaaatttccacccgaagtaaaggaggtgcttgtgaaagaattgtttggtcagccatacagcgagtcagacccttattgggtcgttaaagggtattttgacaggatgtatgatgatggctacttcattgaggcggttggctatatcgtgaagagatgggggttcagtacggatggggcgtactgtaacttccctgatgaaaatagtccgtttgatgaggagcacttcgagggggttgagttttcttatggctatccccctaaggatgaagacaccattgttgtaagcgaggctgtttgttctaagttcattcggctcgcttgtgaaaagtatcttcagcgccatcctgaagatactgagaaagtaaaagagcttttagataagctgtctttctgatccctgaccgatatactccgtagccatgaacagattgaatcgtcaaaagcctctattcaagttcctggacgtgttcagtcacgtgttaacttgatggccggtggcaagatgcgggttgagcgaataaaggggcagatgtattttccctaccctgatttctgagcagggaggctccagtgcagacgtcgtaaggaggctccgcgatgcctaggcagaggcgagtggttttactgaactatccgcttcacgtggttcagtgtgggtaagatcggcagtggtatacagtggaaatgagaaatataagcactagccaaaactagagtagggaaaataaatctgtccccttttcttcttcgcagatcattactattttgctattgcatactaccccttgctccaggaataaaggagtaaaagaataaaaggggcagatttatcttccctgctctaatgctctgaaaaggaggtcctagacgccgtaaggggactccgcgatgcctcggtaagggcgattggtttagcgagttattcgctttgagtggtttagcgtgagcggttgctgagattatggtagtaaaaataaatctgtcccctttcccacggtccccttttctcacgggtgttgtactcagtttttgtggtcgccgctaatcaactagatcgtgatcaatctccaactcgacccctcgtaaaaatatagaggtaataataagtgctgacaaaaaatccatcatccagaatatccagcccttgaatagtagtgcattaattggaagtgcggcaagaaagaaggctgcattcgctactcctaagtctctatggtagtttcttgcaattagtgttgttttgcactttttgcaagttgctcttccgtcagagctgagcctaataaaagaaatgctgtttccacatttcggacaggccaaatttaagattctcattataatcactactcacactgtttgggtgcatcttccgagggtgggtcatatggagaacacagcatataacatgccgtgctgcttactgcggccctacaagccgcaccagcaggcgttagcggacccccaagaatgccgcatgggacgctagttgctctgcaaatcatccggcaattggatggaattctggtgtcacgtccatccccattcctcattacgcactctgcagtcaggcactttgcagcagggttaggtggtggtggattcagaatgcaacgtgtttttagtccattatatctgtcccaataaacctccatgtgactacccacgccacaaagcccgttggggtcaaagtaatttattggatttccagttacatacccgaatgtattaagtcctcctgccaacccaatcggatcactctccacataccgcccagtctccggatcatagtcgcggaagtagttgtagtgcagcccgctctccgcatcgtagtactgcccggggaagcgcaggttgacctgggtgctgccctggctcagcgcttcgccgcggccgaaggcgtcggactgccactgccaggcgatctggccgctggcatcggtggccaggcgcggggtgtcgaggtggtcgccatggaggtagagcagggtcgggttgccgaccttgccctgggcgtcgtagtcggcgtcgatggtggccagcggcaggctgtccagccacaggtagtactgggctcgcagtttccggccgctgccgtcgtgttcggcttcgctgagcaattggccgtcggggccgtagaggtaggtggtgatgctttcgggggtgagcttgacgatgcgctggccgagggcgttgtagcggtattcggcgacctgctggccgtcgaggctgacgctttgcaggcggccctgggcgtcgtaggccagtttgcgtgcggggcggtcctgggtgaggttgccggcggcgtcgctggtcaccacttgcgtgccgatggcggtcaatcggttgctgtcgggcgcgtactggtagtcctggctgctggcggtgccgcctgaggcggggttgtcgctgcgttgggtgcggttgccgaccgcgtcgtaggcgtagctgcgcccgccctggacgccgcgttcctcggtcaggcggtccagcgggtcgtactggtagtccagggtgccccagaggctgtggcggtgctgctggatattgccattggcatcgtgctggtagtcgctctgccaggggccgaccttctgccgcagcagttggtagtcctggtcgtactcgcggctgagagtgatgccgttgccccaggtcaggcgctgcagcgggccgaagggcaggtaggcgatctgcccgaccagggtgctcggcgccttgtcgcccactgccagggtcacgctggcgacctggccgccggcgttgcgcgggtagccgatggcgaggccggaggggtagccgatctccagcagttggttggccgcgtcgtagcggtaggtcacgcggtcgagcagggtctgctggtcgaggcggatgctgcgcacctgctcgaccaggttgccgcgctcgtcgtagcggtacaccaggctgtcgcgagcgccatcgatggcgcccaggcggccgatgcccttgttgccgtcggcggtgaggtcgtagcggtactgtacgtcgaggctcgggtcgctcggcgagcggcgctcgaccagccgattgagggcgtcgtagcgatactcggtgaccgcaccgcgagcgtcggtgcggcggatgacgttgccggcggcgtcgtgctcgaaggtggtggtgccgctgtccgggctgaccagtcgggtcaggttgccgaggccgtcgtattcgtagcgggtggtgacaccgcgcgggtccttgacctcggtgaggttgtcctgggcgtcgtaggcgagtcgggtcttgccgccgaggggatcgctctggccgaccagccggtcgagggcatcgaaggcctggctgtgggcgaactggcgcgggttggtttcgccgaccggattgtcgttgaggtcgtaggcgaagctgcgtgtctggccgccggcgccgaccgcacggagcagccggccaagctcgtcgtaggcccattgctgctggcgcaccaggctgccgctggcgtccttgatgcgctgggcggtgcgattgcccttggtgtcgacgtcgtattcgaggcgttcgccgaggttgttgccgatcgctaccaggcgccgtgcgtcgtcgtattcgtagctcagccagctgccgtcgccacgggtgacgcgggtgatctgaccgaccgcgtcatagtcgaagcgggtggtgctgccggcggtgctgacggaggccagccagccgtcgacgccggtgtaggcgaggctgctggtgacgccgttggcatcggtgatgctgccgggcttgccgcgctcgtcatagtcgccgaggcgggtgacctggccgagggcgttggtcacctgggtcaggttgccgcgactgtcgtaggcatagagggtgacgtcctgcacatcggtgcgcggaccgtcggcgcgctcgatcaggccgagggcgttgtagctgtagctccaggcgcgctcggccgcctgcgcgggcagggccagggcgcaggccagggcgagggcgccgagacgggggaagtatggggggatgcgcatgggtgtcgtccttgtcagcgggtggtgacggtctcgccggtcttgcgtccctcggcgtcgtactggtagcgggtgatccggccgggctcgctgacctgcaccgggaggaacagggtcgggtgccagtcggttgtgatggtgcgcgcctgcggggtgccggcggcctcggtgcgcgaggtctccaggccacgggcgttgtactggtaggtggtcaggttgccgttgttgtcgcgtttgctggtgagcaggccctggtcatcgtaggtgaaggtggaattgctgctggggcagttgggagagggttcgccttcgatggcgacgatgcgtttgatgccctggatcacctggaagcggtaggtggcctgcttgccgtattcgttggtgacggtggtggagccgtcatcgttgtaggcgagggagaccttttcggcgccgttggcgtgttcgctggagatggcgcggccttggttgtcgtaggcccaggtggcgaagcggcgattattgttatcctggatgcctgtaagtagttttatgttcctcgggtcgtcatagaggtactgtgttttcgtgctgtattgcccatctgtccgtgttaccgatgtgagtcgctgttccttgtcgtatgtgtactcaatggatataccccctgtctgagcgcgaaggagttgatggttggctccctccgagagaacgagcttgttgccatgctcgtcgccaatcgtaagattagcgcctcgctctacacgatatttgcgaccttccttggtggtgagtttagtgagtattccattctggtcgaactccatcacttcgttgagttcggaggtgtagctaaactttcctggtaaccggctaagcctgcccagatctgtgatggaggttagatcttttcccgatcccgtgaactccgaggcttttccgttttcgcggtagagtaggaagccatcacccttgcgtgttatacgcgcagaatacgaatgtcgccacaagccgtccaggccgttgtagtaacgggtcaacgggatcggaatacttaagtcgtgttcaacttggtatttgttgccattggtgatattaaccggatttcctgcacagccctctggtggaggcggtcccttttcgaggccgtttttatctggaagcttacaaccagagtcatccatttcgtgaccaggacggcaatcgcattcccccgtttgctgattgtactcagcccccagggggcacgatgaaccttcacgaatcaaacgccaattagggcaatcaccatcacagtggcgaacatcgctaggcttttcgcggtaatgatacgtgacacggcaatatcccataaacacgtctcccgaagggctcacaaccggcacggcctcggtaaatgcccagctactttcggtgcgatcagcaacctgtcgagctttctcacaggattcagagggcgagcgtgaggtactgcttgagtagaaggtaactcgccatctatagatgtcctcgccaaagcacatctctgttgcaagcagggatgcaaataaaataagtaacaggtgtggtttcttcacctaggtctcctggagtaaattcgattaaagatatctaggttggggaagtatgaaagtgtgtaattcataggggctagcgtactctgctctatggagtcgtgacgctctgttagaactctgaatgagcgtattcgaatgatctgatgatcacctgaaaagaacttcctttttatctgctcaccagcttatagtccgcaatgagactcgatcctcggtgcgctacttgctaccccctaacccatagaccagatgaacatcctccggctccaaccgatacaactcctcatccggttccatgcacagccggcatccgagtctcatatagaaatccaccgtgttctgcgacggcgtagccgaaacgtagagcgcgctggcgccgaggtggcgggcctgggtggcggcgaggtggaagaggtgggcgccgaggccgcggcggcggtaggcgtggctgaggtggaggaacttcagttgcagccagtcgcgctcggggccgaggcggcgtgggtcgaggactaccgcgccgatcaggcggccctggtcgaacaggccgaggaaccagccgccgcggtcgaagcagtcgagcaggatcggcgtgtaatgctcggcctcgccctccggccagccgcgcatgtcgtagaactcggggcgcagcaccagttggccggcctcgacggaatacaggtgttcgatcacttcgctgcggtcgatctcccagaccagggggatttcgtcgcggcgcagcaggcgttcttcggtcatcgtggtttccttgcgctgaggccgtacatcagcggcaggcgcggacgatcggcgggcggcagcatgcgtccgccgccgccgtcgcgcatgccgtcgaagccggcccagccgttggcgtaggggtattcctccagccgttcgagttgcaggccggcgccgagcagggcgccgatcacatcggccaggccccactggaactcgtagctgggatgagggttgctgaagttctcgacgccggcgcggtagccggagggcgccaggctggcgccggactcggcgacgtagtcgctgacgccgctctcggcgatcggctcgcggctgaagtagtcgtaggccggttgccagtgtgggtcgaagtacagggcgaaaggatggaactccaccaggacgaagcgcccgccgggaaccagtacctgggcgatgccgtcggcccagcgcttgaggtcggagagccagaccagcgtgccgtaggaggcgaagacccgttcgaagcgttcgccacgggtggcggcgacgggcagccagcggaggatgtcgtcgcgctggaagtcggcggcgatgccgctgtcgcgggacagctggcgggcgaagtcgatggcgctgtcggcgatgtcgaccccggtgacgcgggcgccaaggcgcgccaggctcaggctgtcctgtccggcgttgcattgcagatgcagcaggcgcaggccgtcgagatggccgagcagttgcagttcctcgggatagagcgtggaaccgccgttgcggaagaaggcggcctggtcggccttgtggctgttgtgcgcccgggtggcggcgttccacgacagccggttggcctcgtgcaggtcggatcgcatggttcgactccttccctggagtgcgccaccgcgcggatggcgggtccgggggattacatgtccttgatgctgcgcacctggtccttgttgacgcgggtgcgcttgccgtccagttgctccagttcgtagaagccggaactacgatcatagcgcggggtatccaccgcctggatctcgcggccatcgttgagggtgacgatggtcggggtggagcagccggccaggacggcgaatgcggacgagagcaacagggcgggcagcagacgggaggtcatcggaattttccttcggacggttttcgaggcggcggattctactccagtcgcggcgcaaccgctctagcctggatcacagcggcaaatttccgctgtgatcgtacgtctcttccggtgagccgcccggatggcggcgcctattcgaagggagattccatgtctgccgtttccacctcgttgttgcttttcctcaacctgctgaccccggcccaggccgcccagcccgtgccgctggccgatggccgcatcgagatcgctgccggcgagagccgccagcgctacctcgaccttgcccccggcgagttgcagttgctcgacctggaggtcgaccgcggccgcgtccgcctgcgcgccaccacgcccgacggcaaggcgttgcgcgcgacggagctggccggacgccagtcgctcggcctgcaggccggcgagcgccagggcctgcgcctgaccttcagcgccgacgaagacaccgcactgaccctgatccccacccagcgcctcaccccgcagaccccggcgcttgattcgccggcgccgcagagcccgaccctgcaacgcctgcaggcggagcttgcggaaaagcgccccggcgcgctgaaggcgttctggaagcaggtggcgaagcagggcacgccgctggtggagccgctggatgccgaacgtgtgctggtcaccttcctctggcgccagcagcgtcccggcgacgtgcgcctgctgtggccgaccccggaggtcaacacccgccgcttcgaggccctggccggcagcgacgtgcgctacctgagcctgccgctgcgccgcgacgcgcgggtttcctaccagctcagcgccgacctgccggacctgcaacaggccgatcgcggcaccttgcgcctggcgttgcaggcggcggcgcggccggacccgctgagccgtacgccgtggctcaacagccgcgcgctgccgcgggccgagcaggcctcgctggtgcagctcggcggcgcccctgccgagacctgggaccagccgcgcaaggacgtgccgcgcggcaaggtggagcgcctcggctatagcagccaggccctggccaaccagcgccagctgacgctctacacgccgccgggctacgacccagagggccagcgctatccgctgctggtgctgttcgacgaggaccactacgcgcgcgacgtaccgaccccgaccatcctcgacaacctgatcgccgccgggcgtatccgcccgaccctggcggtgattgtcggcaatgtcgacgccagcagccggggccgcgagctgccctgcaacgaggccttcgccgacatgctcgcccacgagttgctgccctggttgcagcagcgctatgcattgagcgaggagcctgccgatcgcgtgctttccggttccagctacggcgggctggcctcgggctgcatcgcctaccgttatccggaacgcttcggcaaggtgctgagcctgtccggctcgttctggtgggggccggacgagcagcagcctcagtggctggtacggcagttcgccgctggcgagcgtttgccgctggcgttcttcctcagttccggcctgctcgaggagcccgaggcggacggcattctcggcagcaaccgcagcctgcgcgcggcgctgcaaggcaagggctacccgctgcactaccgtgagttccccggcggtcacgactacgcggcgtggagcctggagcttgccgaagggttgcaggccttgttgccgacgcattgagccggctggctggcgtggggcggatagccgcttgcggttatccgccgtgccgcggcctggagatggggaaggctgtccggagcgtattcgcaatgcccaccgcgttgcggaatcggaaaaaatcgtccagggccatttgccagcgtcggcggataggggacaatcggcgttcgcctcaatcgaacgacaaggatgttctcgatgcgccgactcttgcgcccggtattctgcgccgcgctcttctgcctgtacccagcgctggtccaggctgccgccgaaagcgaaatcctcggcctgttccagcgctggcaggccgcccacgggcaacgcagcggcaaggccctggaaggggtctatgcgccgcgcctggactactatggccgcgcgcagacgcgcgagcgcaccctctccgccaagcaggccttcttcgcccgccatcccgacttcgagcagcgcatcgtcgctgcgccgcagatcgtgccgggcgaccaggaaggccgctacgaggtgcgcttcgtcaagcaggtacgcctcgacggacgcctgcgcaactatccggggctgctcctggccgagcgcgccgggcctggcgatacctggcgcttcgtcggcgagagcgacgagatcacccgctacgccgtcgacccgcggtacaccccgctggctcgcggccgcttcgccggtaccgaggcggacttcgcctgggtagtggcccacgcgccgaacagcgccgccttgtgcgacgaatacgaggattgccgctgcgacctctggagcgccgacgcgcgcgtcccgcccaagccgctgggcagttgcaccggcgcggtgctcagcgtcctcggcggcctcgacgacagcggccgcgagcgcctgcaactgctgcgtacctggtggaccagcacctggaccaagtcgtcgctgctggaaatccgcgacggcgagtgggtgcgggtgctgccggacatctccaccacctgggacgacgccgaggccgaactggtgctgtacaaggccgacccgcagcagccgggccgggtgctggtgaccgaaaccgtgatggacgacgagggcgactggagccaccgcacccgcagcgaggcgctgcgccccgtaccctgacgccggccccttgggctgggcggcgccaggccgtacaatcgacggctttatggcgagcgtcgccgcagtccaggttcccgcatgcgcatccacgtctccttcatcgaccgtgtcggcatcacccaggaggtgctggcgctgctgggtgggcgcaacctgaacctggatgcggtggaaatggtgccgccgaacgtctacatcgacgcgccgaccctcagtcccgaagtgctggaggaactgcgcgcagcgctgctgggcatccgtggcgtgcaggcgatgaccgtggtcgacatccttcctggccagcgccgccgcttgcagctcgatgcgttgctggcggcgatggccgatccggtgctggcggtggacggcaagggcctggtgctgctggccaacccggccttcagcgagcgctgcggacgcgacccggccggcgagcggctggccagcctgttcgacgatgaaaccctggaggatgcgctggtcgagcagggcttccgcctgccgctgcgcgaagtgaccttcatgggccaggccctgctgctcgatgccacgccgatcaccgaagggccgggcgagggcgagcggcacctggccggcggcctgttgaccctctacgaaccgaaccgcatcggcgagcgcctggcggccttgcaccatgaccatgccgaggggttcgagatgctcctcggcgattcccagccgatccgcaccctgaagacccgtgcgcagcgcgtggcggcgctcgacgcgccgctgctgatccacggcgagaccggtaccggcaaggaactggtggcgcgcggctgccatgccctgagtgcgcggcacaactcgccgttcctggcgctgaactgcgcggcgttgccggagaacctggccgaaagcgagctgttcggctacgcccccggcgccttcaccggcgcccagcgcggcggcaagccgggcctgctggagctggcccaccagggcacggtgttcctcgacgagatcggcgagatgtccccctatctgcaagccaagctgctgcgcttcctcagcgacggcagcttccgccgggtcggcggcgaccgcgaggtgagggtcgacgtgcggatcctcagcgccacccaccgcaacctggagaagatggtcgccgagggcagcttccgcgaggacctgttctaccgcctcaacgtgctcagcctggaagtcccgccgttgcgagagcgcggccacgacatcctgctgctggcgcggcacttcatgcagcaggcctgtgcgcagatccagcgcccggtgtgccggctggcgccgggcacctacccggcgctgctgagcaaccgctggccgggcaacgtgcgccagttgcagaacgtgatcttccgtgccgctgcgatctgcgagagcagcctggtggatatcggcgacctggagatcgccggcaccgccgtggcgcggcagaacgacggcgaggtgggcagcctggaggaggcggtggagggcttcgagaaagccctgctggagaagctctacgtcagctatccatcgacccgccagttggcggcgcgcctgcaaacctcgcacaccgccatcgcccaccgcctgcgcaagtacggcatcggtccgcgcgcctgaagcgggctcagccctcgctggaatacaccggcttgccggcgaaccaggtcttcagcaccttggtttcgcccagttgcgtctccggcacctcgaacacgtcgcggtcgaggacgatgaagtccgcctgcttgcccggctccaggctgccgatccggtgctccaggccgatggtccgcgcagcgttgcgggtgtaggcgtagaacatggtctggcggtccaggcgttcgccggcgttgagcacgccctgcgggcccttgcgggtcaccgcctgctggatggccttccacggcgacaggctggacaccggccagtcgctggccccggcgatggtcgcgcccttgctcagcagggagtgcgccgggtactggtagcggtaggcgaaggcactgatatagggcttcatcaggtccaccgtggtttcgtcggcggcggcccagtacagctgcatcgaggcgatcacgccaagcggcctgaagcgctcgaactccttgggattgaccagttgcaggtgggtaatcgaatgggcgatgccgctgtcgcggtcgcgccgcgcctgctgcatgccgttcagcgcctcgcgcaccgcgcggtcgccgatggcgtggacgtggaccagccagccgcgggcgtcggcggcgctgaccagttcgccgaagtgcgccgggtcgatcagcagttcgcccgtcttcctgctgttgcggtagggctcgaggagcgcggcggtctgcgccgggtattccggtacgccgtcggcgaacaccttgattcccggcagggtcaggttggggctgccgaggaagcgctggcgcaccttgtccagcacctcgaggtcggtcggccggctgcgtgggttggcgaccaggagggcggcgacgtgggcactgagttcgccgctcttggccagccgctggtagaccggtagcacgccgacggtgttctcgtcgggcctgaggctgaacagggcatcgcccggcgagccattggcggccgggtccatccatgcggtcaggcccagcgagttgctgtagcgcaccgcgctgcgtccggcttctagcatctgttccgcgctcggcgccggcagtaccgcgagcaccgcgtcgagaccggcatcggcgaggaagccgttgggggtggcgtcggcgtcgtggccgatggtgttgcgctgttcctcgggcagggcgcggacccgcgcggcgtcgatgccggcgcgtttcagcatggcggcgttggcccagccggtgtggtggtcgctaccgatgaaggccagcggctggtcggcccattcgccgtggtcgaatcgcgctcggaagtccttgacctggctccagtaggcggtatgcatgccgctgacattgagcatgtcgccatgtcgcgccttgccgttgtcgcgccaggcgcgcaggcgccgttccagttcgtcgaggccgacctgttcgttgcccatgtccgcgccggccagctccaggccgccgaacaccgcgtgcgaatgggtgtcgatcaggccgggcatcaggcgcttgccgccgagatcgacgacctggctgtcgccatcggccagggcgcgcagcccggcctcgtcgccgaccgcgaggatccgcccgtcctccaccgccagggcctcggcgaagggttgctgcggattggcggtgaagatcctggcgttgaccaccagcaggtcggcggcgccgagggcgtgcagggggatggccaggcaggcgccggcgaggagggtgggaatccgttgcttcatggtggtttcctttgcttcttggtcttgtgtagcgtggcccgggcaaggcgagactagccaaagcgccggcccggcagaaccgggcgcgacgcacaacacttgtgccggaacggaaggagtcgatggacaaattgaatgccctggcgatgttcgtcgccactgccgaaaccggtagcttcagccgtggcgccgagcgcctgggcaagacgccctcggcgctgaccaaggccgtcgcccacctggaagcggaactcggtgcccgcctgttcgagcgcactacccgcagcctggcgctgaccgaggccgggcagatctacctggaggcggcccgccagtccctggaaacactgcgcacggcggggcaggagatcgaactgctggagtcggagttgcgcggcgaactgcgcctcgccgcgccgccgtcgttcgccgcggcgttcctccagcaggcctgcgccagcttcctcgaggcgcatccgcggatcagcctgcgggtggacctcgacgaaaccttcctcgatctcagcgaaggcggctacgacctcggcctgcgcgacggccccatcgacctgccggggctggtggcgcggccgctggcgccgaaccagatcgtgctttgcgccagccccgcctacctggcgcggcaacccgcgccgcaaggcccggaggacttcgagcggcacgcctggctggtcttccagcacccttcgctgaaccagaacttctggtggatggagcgcgacggcgcccgccagcgtatcgaccagccgcgcccgcgactggccagcgacaactacgacttcctgctcgcccacctgctggccgggctgggcctgcagttctgcccgcagtggagcgtcgcgccgctgctcggtgaagggcggctggtgcgcctgctcggcgactaccacttcgacccggggccgttcgggccctccatccatgtgctctatccggggcaccggcgcaacacgcggaaggtccgcgcgttcctcgagcacctgcgcgccagcttgcagcgacaggggctgtgccatcggctgtaacgcttcggttacgagtggaacgaattcgttccgattgccggaaaaacctttgctgtcaggcgtttgcgctctggttcgggaaatgtccggcgggtctgtaacgaaagcgttccatggcggccctgtccgggtttcccccgcgcccggccacgccccgtggcgacagggccggggccgcttggcaccctgcttgctacgggcagccgcagaacaaagtcccgtcccgaccgggcgacccgctgacaatgaggatccagcatgagcaagttgcgctttaccaccgaccacgaatggctgcgccaggacgacgacgggctgctgaccgtcggcatcaccgcctacgcccaggacgccctcggtgacgtggtattcgtgcagttgccggaactcggcgaacacgccgccggcagtgaagtggcggtgctggagtcggtcaaggccgccagcaacatcctgatgccgctggacggcgaggtggtagcgatcaacgacgcgctgccggacgccccggagctggtcaaccaggacccactcggcgaggcctggttcttccgcttccgtccggccgacgccggcgcctgggaaaagctgctcgaccaggccgcctacgaccgcctgctgaacgccaacgccgacgcctgaggatcccgtcatgaccgataacctgaacctcggcgccatcgacctgggcaccgacgacgaattcatcgcccgccatatcggcccgcgtgccgccgacacccaggccatgctccagcgcctgggctacgactcgctggacgcgctgatcggcaacgtgatccccgacagcatcaagggcagcagcgtgctcgacctgccggccggcatgggcgaggccgaggcgctggccagcctgaaggcgatcgccgcgcgcaatcgcgcgttgcgttccttcatcggccagggctactacaactgccacaccccggcaccgatcctgcgcaacctcctggagaacccggcctggtacaccgcctacacgccgtaccagccggaaatctcccagggccgcctggaggcgctgctgaacttccagaccctggtcagcgacctctccggcctgccgatcgccaacgcctcgatgctcgacgaggcgaccgccgccgccgaggccatgaccttctgcaagcgcctgtcgaagaaccgcaccagccaggcattcttcgcctcccgccattgccacccgcagaccctcgacgtgctgcgcacccgtgccgagccgctgggcatcgaggtggtggtcggcgacgagagcaccatcgaagacttctccgcctacttcggcgcgttgctgcaataccccacctgcgacggcgagatcgtcgactatcgcgaactggtcagccgcttccatgcggtcgatgcgctggtcgcggtggccgccgacctgctggcgctgaccctgctgaccccgccgggcgagttcggcgccgacgtggccatcggcagcgcccagcgcttcggcgtgccgctcggcttcggcggcccgcacgcggcctatttcgccacccgcgacgccttcaagcgggacatgccgggacgcctggtcggcgtctccatcgaccgccacggcaagccggcctaccgcctggccatgcagacccgcgagcagcacatccgccgcgagaaggccaccagcaacatctgcaccgcccaggtactgctggccaacatcgccagcatgttcgccgtctaccacggcccgcagggcctgctgcgcatcgcccggcgcacccaccggctgaccgcgatcctcgccgccggcctggagcgcctgggcgtggtcgtcgagcagaagcacttcttcgacaccctgagcctggccaccggcgcgcgtaccgcggcgatccatgccaaggcccgcgccgccgggatcaacctgcgcgagatcgatgccggccgtctcggcctgtcgctcgacgagaccgtccgccaggccgacgtggaaaccctctggggcctgctggctgaagagggccaggcgctcccggacttcgccacccttgccgccagcagcggggaccgcctgccggtcgagctgctgcgccagtcggcgatcctcagccacccgatcttcaaccgccatcactcggaaaccgagctgatgcgctacctgcgcaagctggcggacaaggacctggcgctggaccgcacgatgatcccgctgggctcctgcaccatgaagctgaacgccgccagcgagatgatcccggtgacctgggccgaattcggcaacctgcacccgttcgccccggccgagcagagcgaaggctaccgccagctcaccgacgaactggaggcgatgctctgttccgccaccggctacgacgccgtgtcgttgcagcccaacgccggctcccagggcgagtacgccggcctgctggcgatccgtgcctaccaccagagccgcggcgacagccagcgcgacatctgtctgatcccgtcctccgcccacggtaccaacccggctaccgccagcatggtcggcatgcgcgtggtggtggtggcctgcgacgcgcgcggcaacgtcgacgtcgaggatctgcgcaacaaggccagcgagcacaaggaacgcctggccgcgctgatgatcacctatccgtccacccacggcgtgttcgaggaagcgatccgcgagatctgcgccatcgtccacgactgcggtggccaggtgtacatcgacggcgccaacatgaacgccatggtcggcctgtgcgccccgggcaagttcggtggcgacgtttcccacctgaacctgcacaagaccttctgcatcccccacggcggcggcggcccgggcgtcggcccgatcggcgtgcgcgcgcacctggcgccgttcctccccggccacgctcgcggcgagcgcaaggaaggcgcggtgagcgcggcgccgtacggcagcgcgagcatcctgccgatcacctggatgtacatccgcatgatgggcggcgaaggcctcaagcgcgcctcggaaatggccatcctcaatgccaactacatcgcccatcgcctggaggagcactacccggtgctctacgccggcggcaacggcctggtcgcccacgaatgcatcctcgacctgcgtccgctcaaggacagcagcgggatcagcgtcgacgacgtggccaagcgcctgatggacttcggcttccatgcgccgaccatgtccttcccggtggccggcacgctgatgatcgagcccaccgagagcgagtcgaaggccgagctggatcgtttctgcgacgcgatgatccgcatccgcgaggaaatccgcgcggtggaatgcggcgagctggacaaggaagacaacccgctgaagaacgcgccgcacaccgccgccgaactgctcggcgaatggaaccacgcctacagccgcgagcaggccgcctatccgctggccagcctggtggaggccaagtactggccgccggtgggccgcgtcgacaacgtctacggcgaccgcaacctgacctgctcctgcccgcccatcgaggcgtacagcgaggagtgacggacgaggagggcgccgccagcggcggcgtcctcgcgtttccggcgatacccctttcccggcgccgcgcttgcgtagcggcgccgcggccacgctcgcgccagcgagcgtcctgacaccgacacgacaagaggccagcgccatgttcagcaagcacgaccagctccagggctacgacgacgaactgctcgccgcgatggacgccgaagaccggcggcaggaagaccacatcgaactgatcgcctcggagaactacgccagcaagcgggtcatgcaggcgcagggcagcggcctgaccaacaagtatgccgagggctatccgggcaagcgctactacggcggctgcgaacacgtcgacaaggtcgagcggctggccatcgaccgcgccaggcaactgttcggcgccgactacgccaacgtccagccgcactctggttcctcggccaacgccgcggtgtacctggcgctgctcaacgccggcgccaccatcctcggcatgagcctggcccacggcggccatctcacccacggcgccaaggtgtcctcctccggcaagctgtacaacgccgtgcagtacggcctggacaccgctaccgggctgatcgactacgacgaagtcgagcgcctggccgtggagcataagccgaagatgatcgtcgccggcttctccgcctactccaagaccctcgacttcccgcgcttccgcgccatcgccgacaaggtcggcgcgctgctgttcgtcgacatggcccacgtcgccgggctggtcgccgccggcctctacccgaatccgatccccttcgccgacgtggtcaccaccaccacccacaagaccctgcgcggcccgcgcggcggcctgatcctggcgcgcgccaacgaggagatcgagaagaagctcaactccgcggtattccccggcgcccagggcggcccgctgatgcacgtgatcgcggccaaggcggtgtgcttcaaggaagcgctggagccgggcttcaaggactaccaggcgcaggtgatccgcaacgccaaggcgatggccgaggtgttcatcgggcgcggctacgacgtggtttccggcggcaccgacaaccacctgatgctgatcagcctggtgaagcaggggctgaccggcaaggccgccgacgcggcgctcggagcggcgcacatcacggtgaacaagaacgccgtgccgaacgatccgcagagcccgttcgtcacctccggcatccgcatcggcaccccagcggtgaccactcgcggtttccgcgagggcgagtgccgcgaactggccggctggatctgcgacatcctcgacgatatcgacaatcccgaggtcggcgaacgggtcaggggccaggtcggcgaattctgccggcacttcccggtctacgctgattgaacaggagcgccgccatggtggcggccaatccgcaagcggagacgagcatgtccctgtgtgtcttcgatctgttcaagatcggcatcgggccgtccagctcccacaccgtggggccgatgcgtgccgccgcgcgcttcgccgaggggctgaggcgcgaggggttgctggaggccactgccagcgtcaaggtcgagctgtacggctcgctcggcgccaccggcaagggccacggcagcgacaaggcggtactgctcggcctggagggcgagcagccggacacggtggataccgccgcgattcccgctcggctcgatgccatccgttccagcggcgagctgcgcctgctcggcgagcggccgatccgcttcgtcgagaaggaacaccttgcgctgatccgcaagccgctggcctaccatcccaacggcatgatcttccgtgccttcgacgctgccggcctgcaggtccgcagccgcgagtactactcggtgggcggcggtttcgtggtcgacgacgaggccgccggcctcgaccgtatcgtcgaggaccgcacgccgctggcgttccccttcaagaccgcgcggcaactgctcgaccattgcgcccacgaaggcctgtcgatcagccagttgatggccgagaacgagaaggcctggcgccccgccgaggaaacccgcaccggcctgctgcgtatctggcaggtgatgcaggactgcgtcgaggccggctgccgcaacgagggcatcatgcccggcggactgaaggtcaggcgccgtgcggcggcgctccaccgccagttgtgccagcggccggaggccggtctgcgcgacgccctcagcgtgctcgactgggtcaacctctacgccctggcggtgaacgaggagaacgccagcggcggccgcgtggtgaccgcgccgaccaacggcgcggcggggatcattccggcggttctgcattactacgcgcgcttcatccccggggccgacgacgacggcgtggtgcgcttcctgctcaccgccgcggcgatcggcatcctctacaaggaaaacgcctcgatctccggcgccgaggtcggttgccagggcgaggtcggcgtggcctgctcgatggctgccggggcgctctgcgaagtgctcggcggtagcgtgcagcaggtcgagaacgccgccgaaatcggcatggagcacaacctcgggctgacctgcgacccggtcggcgggctggtccaggtgccctgcatcgaacgcaacgcgatggcttcggtgaaggcgatcaatgcggcgcgcatggctctgcgcggcgacggccagcatttcatctctctcgacaaggtcatccgtaccatgcgccagaccggcgccgacatgaaaagcaaatacaaggaaaccgcgcgcggcggcctcgccgtgaacatcatcgaatgctgaaccgcgccgctgcgccggcgcttcttttttctttcccgacaatcgatcgcggctctccggcagacaggaggccgggatgccatggagtgaaacatgaccacagaaaccctcgccaagacgcccctgcacgccctgcacctggaactgggggcgaagatggtgcccttcgccggctatgacatgccggtgcagtacccggccggggtgctcaaggagcacctgcacacccgcgagcaggccggtctgttcgacgtttcgcacatgggccagatccgcctggtgggcgccgatgcggcgctggccctggaaagcctggtgccggtggacatcctcgacctgccggtgggccagcagcgctacgcgttgttcaccgacgagcagggcgggatcctcgacgacctgatggtggccaacctcggcgattgcctgctgctggtggtcaacgccgcctgcaagcaccaggacctggcgcacctgcgtcgtcacctggagggccgttgcagcgtcgagccgctgttcgaggagcgtgccttgctcgccctccagggaccggcggcggtgcgggtgctggagcgcctggcgccgcaggtggcgcagatgaccttcatgcagttcgcccgcgtcgagctgctcggccaggactgctacgtcagccgctccggctataccggtgaagacggctacgagatctccgtgcccgccgcccatgccgaggccctggcgcggcgcctgctggccgagccggaagtggcgccgatcggcctcggcgcgcgcgactcgctgcgcctggaagccggcctgtgcctctacggccacgacatggacagcgccaccacgccggtcgaagccagcctcggctgggccatttccaaggcgcgccgcgccgacggcgtgcgcgccggcggcttccccggcgccgagcggatctttgcccagcaggcgcagggcgttgccagcaagcgcgtcggtttcctgccgcaggggcggatgccggtgcgcgagggcgccgagatcgtcgatgcccagggccgggcgatcggcaaggtcagcagcggcggtttcggtccgagtctcaacgcgccgctggccatgggctacgtgccgagcgagctggccggcctgggcagcgaggtgacggcgatggtgcgcggcaagccggtgaccctggtggtcagcaagatgcccttcgtggcgcagcgctactaccgcggttgagcactggccctctctcgcctcggcgggagagggcggcgaccggcctcacgggtgtttcggccgctgccgttgcaggcccagcttcttggcccggtggaataccgctgcgcgggtcttgccggtctgctgcgcgcaccatagcgagccgcgctgctggtagtgctggcgcaacagatcttcctcggacttgctccagatcgcattgttgcggtcgcgcccgctgtgcggggaaagctcctcggccttgctggcgacactctggtagctgcggccgagcatgtaggcgcaccaggccaggctgcgcttgctgccgtggcggcggatgaactcgacttcttcgctggaccaggcggccggtgccttcggcggcgccttgcggtccagcgagcgggcgagggcggcgcgggcgcgcgccaccgcctggtcgccgggattgttgcggcgggtcacgccgagggcgcggcgccagcgccccaccaggctcggactgaaaccccaccagaactgcaccgactcggcgcattcggtacgtaccgcgcgcagcaggtcgccgcagagaatcggcgaagggcggccgctgcgcttgcgcgtcggccagcggaacaggccgtcggtgaagccgccgacctccacggcgccttccagctcgtcgaccagccagtcgccggggatcaccagtgggctggtgtagggcgcgccgagcagcaggtggttgatggtagcgacagaggtaggggtgtctgcagtcatgggacgatccttgctgataccgggccagctgggctggccatatccctgagagcggcgtcgctgcggcatggcgggcgacggcgcgttcgcttcccgtggttcgggcggtcttccggcggagggcgactgcctgtcgcgcctccttgggaacgggctggaagccatgctcatgggcgggctccacgatagatgtgccaggccagccggccgggacgggcggcgatcgccgcatccacctcgatgcgcggcaggtccagcgggtcgcaacgggtatccaccaggccattgcgcgcgccgaaggcgaagcggtagccaagccgaccgagggcggcgcgcaggccgggttgcgcggcgggtgtggtgcgagcttggcagaacaccggtaggggggcggcgcaatgctgctggagctggcggtgggcgcggccgagacagtcctcggcgcaaaggcctgccgatgggtgcggctcctgtccgcgcaggccgaagcgaagcaggccgctgttttccaggcggcgggcccgctcccagtcgccagcgctgtacggtgcgggaaccgggcaggccgcgtgcaaggcctgctgcgaggccgggtcgaggcgttccagcttgcgcaggaggaggtcgaagttgcggctgcgacgctggtcgtcgccggtgcgttcgaacaccgccatgagtgccgcgccgctataaccctccagcagttccagcaagggtccggcggcagtcgcatcggcctgccagagcgtctcggccaccgcttcgcgccaactgcgcgggtcaccgccgatgaaggcgctcgccggcatttcgtagcgttccagcagcggatagacctgctcggccagttccgcagggttgccgtcgacgctcagggcgatccgcaggcaggctggagcggggccttcgagcaggtgttccaggggaacgcagaggaagtgccgctgtagccatagcaacagggtttccaggtcctgacgatcgaggcagtggccttgccggtgcggcagggtcgcgcgccggcgatccgcgactaccggtcccaggcgcagcacgataccgttctggcgcagccggcgctggcctacggaggagttcaggaacgtcatcccgatcaggcttcgcatggcttcccccggctcatcgacgatccgtcaccggcgatcgttccctgcgcgcggcagggctttcgccagcctgtccggaggctgtgccatggactccggccccggcagtcgattcggtcatgggcgagcctcctggggtaatccgcacaaacgtttgctgcgaccacgcaatgcgtggctcgaaccggggcttggcgaggccccggcggttgttcgataaggactgcatggcaccggataacgctacaaaggatcgatatgattcttttttgacgctatcacagtcgatggtcggattattgacgctctgccgctgttataaaaccgtcaggctatgcgaaaaggcctgccggctacgcgtcgaggcccggaatggcgtgcctttgcgggggagatgagggctccggtaggcctatgcggattggttataagaaatccgatttgaatgagaattgccgacgaatggtcgtttgcacggatgtccggtggtttttcccggctgcttagaacctttcgattggttaggtgttgcccagggtgctttacacagactctcgtcttccagtcaagagccttgggatgcagactgtttttcaaatcatgacaacttcttaacgcgcattgttataaagttgcgggcgtttgcgccggcctggccggtaccttcgagttttgcctggagtgaagatgagagtcgacctggacgccgagggcgtcgccgccgaatcgctgccgcgtttccagcaggcgccccggcagttgcgccagctgtggcgatgggcagcggccagcgtcgccttggccgccgcctgcgccgtgctggggttcttcatcggcctgttcgccgccgactcgctctggccgccgctgctgtacaacctcggcgcggcctggctggtcctgttcgccggtctgcacgcggcctaccgggtcgcggcctggcgttgcgtggtcctcggcgcggaggccagcgcgcggcctgcctggctgcgctggcagcgggacgaacccgacgccaccgccgacagcgcctatgaacggctgctggagcgcctgggccaggccatcgcccacggcctggcccagctcgggcacgctgcgctgtggctggcggcgagcgcggcgctggcgttgtgcctggtagccgccggctggcgtctcgacctgccgccggccagttccgggcaagcggccgacctcgccatcggtatctgcctgctgctggccttcgcggtgctggtgctggaacgtcgcctcgccagccaagggccggcgcagtggccggaagccccggtcctcgggcaactggcgcgggcgttgatcggtaccctggtgctggccgccctctgtctgttcctggctcgccagggacacccctgggccccgcgcctggcggtactgctcggcctgttgccggcggcgctggcgctggagttgctgggcagggcgatcctggcgatgttcgcgccgcagcgtgccggcctcgaaccgcgcctggtcgccaccagcctgctggccgacctgttgcgctggccgccgcgtcccctgcagcgtctgcagcatgagttgcaccagcgcttcggcatcgacctgcgccaggtctgggccttcggtttcatgcggcgggcgttcctgccggtgctggcggtggtgtcgctgagcggctggctgctcagcggcgtacgcgagatcggcatggatgcacggggtgtctacgagcgcttcggcaagccggtcgcggtgctcggccccggcctgcacctggggctgccctggccgctggggcgggtgttggcggtggagaacggggtggtccacgagttggccaccagcgtcgccgccggcgacggcggagccgagccgctcgcgcccgccgaaggtccggccccggatagcgccaaccgcttgtgggacgcctcccacgtcagcgagaaatcgcaggtcatcgccagcctggccgaccgtcggcagagcttccagatcgtcaacatggacgtgcgcatcgtctaccgcatcgctctcgacgacgcatcggcgctggcggcgacctaccgcagcgccgacgtgccgacgctggtgcgcagcaccgccagccgcgtactggtgcatgccttcgcctcgcggaccctcgacgaggtcctcggcgagcagcgtgcgggcctggccgagcagatcggccaggccgtgcaggccgatctcgatcgcctcggcagcggcgtcgaggtactgggcgcggcggtcgaggcgatccatccgccggccggtgcggcgaatgcctaccacgcggtgcaggccgcgcagatcaccgcccaggcgctgatcgcccgcgagcgcgggcaggccgccgcgcaacgcaacgaggcgcaactacaggccagcgtggcgcacgaccgggccagcgcgcaggcccgcgagaccctggccgccgcgcaggccgccgaccggcgcttcgccgccgagcgggaaggctatgccgacgccggccaggctttcctgctggaggcctactaccgccaactcggacgcggcctgggcaaggccaacctgctgctcatcgaccaccgcatcgccggcgccggcgcgccgaccatcgacctgcgcagcttcggcctcggccgcctggattccccgtcttcgtcccgtccgtccgccgctccggcgtccgcggccgggcaatccgcaccatgaggagagcgctcttgagcctcggtcactcccactcgcacagccaccacgagcatcatcacgatcacgatcacgatcacgatcacgatcacgatcacgatcacgatcacgatcacgatcacggccatggcgcacaggccgcgccgccctggcgccggctgctggtcgccgcgctgctggtgctgttcgccgtcgccgccgcttgcctggtgcaggtgcgttccggcgaggcgatggtcatcacccgtttcggcaacccggcgcgggtcctgctcgaaccgggcctggcctggcgcctgccgttgccgttcgagagcgcgatcccggtcgacctgcgcctgcgcaccacctccagcggcctgcaggacgtcggcacccgcgatggcctgcggatcatcgtccaggcctacgtggcctggcaggtccagggcgacgccgacaacgtgcagcgcttcatgcgcgcggtgcgcaaccagccggacgaggctgcccggcagttgcgcaccttcgtcggctcggcgctggaaaccaccgccagcgcctatgacctggccgacctggtgaataccgaggcgtcgcgggtgcgtatcggcgacttcgaagcgcgcctgcgcgaacagatcgacaatcagttgctggcgacctacggggtcaaggtggtgcaggtcggcatcgagcgcctgaccctgcccaaggtgaccctcggcgccaccgtcgaccgcatgcgcgccgagcgcgagaccatcgccaccgagcgtaccgccgagggccgtcgccaggccgcggagatccgttcggcggcggagcgcgacgcccgggtgatccaggccgaggcttcggtgaaagccgcggagatcgaggcccaggcgcgggtcgaggcggcgcgcatctacggcaaggcctacgccggttcgccgcagctgtacaacctgctgcgctcgctggacaccctcggcaccatcgtcaacggcgatacccgcctggtcttgcgcaccgatgccgcaccgttccgcgtgctggtcgacgggccgccggcgttccccgccgaagcgccggccaacaggcgccggccatgagcggcgaagcgcgcgaggggctgcacagcccctggctgcaggccggacgcctggcgttcctcgcactgttcggcgtgaccctcctggcggcgctggcctgggcgttttccaacgtccgccagatcggcccggagaaccgcgccgtagtgctgcgcctgggcgcgctggagcgcctggccggtcccggcctgctgctggcctggccgcagccgctggagcaggtggtgctgctgccgtccgccgaacaggtgatcgaacgccgcgtcgagggcctgctgcgttccgagcaggcgcgtcgcgccgatctcgacgtcagcctgtccagcgacgcgctggccggctccggctacctgctgaccggcgacgccggggtggtgcaactggacgtgcgggtgttctacaaggtcgacgacccgtacgcctacgtcctccagggcgcccacgtgctgccggcgctggaccggctggtggcgcgcaacgccgtgcaggtctgcgccgcgcgcgacctggacaccatcctggtggcgcgcccggagttgctcggcaacgacagcgcggtcgccgagcgccgcgaacgcctgcgcggcgacctggtgcagggcatcaaccacagcctggcggcgttggccgcggccggcagcgggctgggcatccaggtggtgcgggtcgacgtgcagtcgagcctgccgcgcaatgcggtaagcgccttcaacgcggtgctgaccgccagccaactggccgagcagaacgtcgccaaggcgcgcaccgaggcggagaaactcacccaggccgccaccgagggggccgaccgcaccctgcagctcgcccgcgccgaggccggcgaacggctggcccaggcgcgccgcgacaccgccagcatcgttggcctggccccggcgctgggcgcgaccgatgccggcctgctctggcacctgtaccgcgaacgggtgccggcgatcctcggcaaggccggttcggtcggcagcgtcgatccgcgcgacgatggccgcctgattctgcaaggtgggcagccatgagccgctgcccgacggtgcccttcgcgggctgtgaaacaatggacggacaagcgaacgtgaaacggctaccctgcgtcggcatcaaccttcggtacgcgcttccgccagcggaacgcggcgccgagtcgaacaaccaggcgaacgggacgggcaatgacggcaggcggtattccattcacgggcaacggtgcgcggctatcacccggcagggccctgctgtgcgggctggcgctgttgctgtgcggcggcgaggcgctggcgcggcagttgccgagcgacatgctggtgggcttcgtggccagcgcgcagtacccggtcatcaccctgaagaagcccaagcagagcctgctgcgcagcgtgctcaccctggggctggggaagaagaccgtcagctattcggtggcgccgtcggtgcgcatccgcacggcgcagaacctgttcatcgtctatggccgcatgccccagctcaagggcagtttcgtcggcctgaagagcgacaacaacgggcaggtcaagcagatctgggagctcaccgagaaggaagccctggactacgtacgccggccggacgcgcgcttcccgcaatagccgccgcggctcgccccgggaggtgcgcatgagcgagccgaccgcccacggcagccatggcggctgcgcgcatcaccatcatcacctgccgttcggcggcggcctgctcagccgcgacgagcagcgccgcgccgcgcgccagctgagcctggcgatgctcgccctcggcctgttgctgctcggcctggcctggcgctggctggcggcggaccaggccggggtcagccagatcctgctcggcgtcgcgtcgctgctggtggcgctgccggtggcccgctcggcctgggacagcctgcggcatccgagcctgcacggcgtcaccgaccagttgatcgcgctggccatgctcggcgcctgggccagcggcgacctgctgaccgccgcgctgctgccgatcatcatgatcttcggccacgtgctggaggagcgcagcgtgatcggctcccaggaggccatcgccgccctcggcgagctgacccgcagccatgcccggcggatcgaggccgacggcagcctgagcgaggtggacaacgccagcctgcgagcgggcgaccaggtggaagtgcgcgccggcgaccgggttccggccgacgggcgggtcctgcagggccaggccagtctcgacaccgcgccgatcaccggcgagtcggtgccgctcgaggtggcgccggggatggaggtctacggcggcgcgatcaacctcgacggcctgctgcgcatcgagataacccgtaccggcgaggcctcgaccctgggcaaggtgatcggcctgatgcagcaggccgagcgcgccaagccgccgatcacccgcctgctggagcgctacgccgggcagtacatgttgctggtgttgctgatcgccgcggtcacctggttcgtcaccaacgatgcccaggccatgctcgccgtgctggtcgccgcctgtccctgcgccctggtgctgtccgccccggccacggctatcgccgggatcgccgtggccgcccgtcatggcatcctgatccgcagctcggccttcctcgaggaactggcggacctgacttcgctggtggtcgacaagaccggcaccctgacccatggcagcctgcgcctgcaggcgctgcgcctggccgatgccgccgaggaggcgtcggtgctgcgcctggccgctagcctcggcgccgccagcagccatccggtgagccgagcgctggcagccctggcggcgcacgatgcctatcatccattgagcgatatccgcgaacgccaggggttcggcgtggtcgcacgaacagcggcgggcgaagccgccctcggccggcccgaactgttccagcaactgggcatcgacgccagcgaggtgccggagcatgagggaccgatcgccggaatcgccctggacgggcgcttcctcggctggctgctgctggccgacagcgtacgcgcggaggccgccgaggccctggccgatctgcgcgaactgggtctgggccggcaactgttgctgaccggcgatcgccgggcggtggccgacgccgtggccaagcaggtggggattcgccaactggtggcgcaggcgttgccggaggacaagctgcgccaggtcggcgcggagatcggcagcggtttccggccgatggtggtcggcgacggcatcaacgattcgctggcgctgaaggccggtgtggtcggggtggcaatgggcgccggcggcgccgacatcgccctggcctcggcggatatcgtgctgatcggcagcgacctgcgccgcctcggcacctgcgtgcggctcagccggcaatgccggcggaccctgcaggtcaacgtggcgatcggcctcggctggaccctggcgatcgtcgccgcggcagccttcggcctgctcggcgcggccggggcgatggtcgcggcgctgctgcacaacctcagcaccttgctggtgctgggcaatgccggacgcctgctgcgtttcgaggagcccctcgggcagccccggccggccgtggagggacgcgaagaggagggtacaccgtgaggcaggcgcaaacgcgacgcaacggctggcgctggctggccctggcggtcggcacgctgtccgcgctgagcctggccgaggcgtcgatggcgcgctggccggcgggctggcaggtcagcgacctgcccgccgcgcagcccggccaggccggcgccggccagcgccagcgcgcggtcaagttgcaggcagacggctcccaggcactggtgatggaggtgacgcggatgcccctgcagagcgggcaggcagtgaacctggagaaagtcctcgggcacatgcgcaagctggtgcagatcgagttcctgcgcaacggcctgcagaccgcctgcacctcgccgcagccgtccaccaccggcgggctggcggcgctggagaccacctgcaccattcgccagcgcggcgccgtggtgatgaagcagaccttgctcgccgcggccggcaagacctcggcctattcgctgtcctatgccggcctggccgaggcctacgacgccagccaggcggaaatccgcgcggtacgggaaagcctgcgcttcgagtgagcgaaatcggacgcggtcggggcgggggctggagtgtcggcggataacgcctgcggagggttgcattggggtaggacggataaccgcttgcggttatccgccttgcgtctgtcgcggatcatttcttgccggtgttctgcaggatctgcagggcctgggtggtggcggtgatgcagcccttggtgtcgccgctggcctggtcctgcctggccttggcctggagttccttgacctcggtgacccgcgcaccggtgaccgaggtcttgccgcgcacggcgaggatatcgtccagcttctgcaggttggcgccgcacaggtcggtgctttcggcggcttgggcggtgccgccgagcagggcggcggcgatgagcagggtacgcacgatcatggcagttctcctttgtgggccgggtggccggacgggggagagacgacaggctcctgggagtcttctccgcatgcccagtatctgaccggagcctcgcgggaatggttcggtcgctcagccgttgccccagggcgggatcgacagcgcctgctggagatgctggatgaacgccttgaccttcggcgacatcgccgccgcccgcgaatacatcgcgtagatcacgtcgtcgagtgggcgcaggccgggcgcggcgtccaccaggcggccgttcttgaggtcctcggcgacgatgaacagcggcagcaacgccagtccctggccgcgcagggcggcgtcgcgcatggcctggccgttgttgctgctgaagcgtccgcgtggcgaaacggcacggggcttggcgccggggaacgccggttcgaaggtccagacctggctcggcgtggcgttgttgtagcccaggcactcgtgctgcatcagttgttcgagggtgtccagcgtgccgtggcgttccgcgtagtcggggctgcagcagaccacccgctggctgttggccagcggccgggcgatcagcgaactgtcgtccaggcgggtaacgcggatgctcaggtcgtagccttccttctcgaagtcggtgaggcggtcgtccatctgcaggacgatctccaggcgcgggtgctggctcatgaagtcggcgatgatcggcgacagccagagggtgccgaagctcatcggggtgacgatgcgcaattcgccgcacaggtcgttctcgcgcagggcgacgatctccgcggcgttgttgagttcctgcagcgaggccttggcggccttgtagaagaaatgcccggcctcggtcggctcgacgttgcgcgtggtgcgataaagcaggcggacgccgaggcgtcgttcgagatcgctgacacgcttgctgatcaccgacttggacaggctcatgcgctcggccgccgacgtcacgctgttgagttcggcgacgttgaggaaggcttcgatatcgtcgaaacgcaggctcatcggtgggcccacgatacagtggcaatcgctcgacgcattctcggctcctcctggtcgttttccttgggctttctatccgcttgattcgcaagctaaatcgatccagccttgagcaagcttacccaatcgaaaggcgccgcagcgttcgttctcagcgaaaacggttttcgcctggacgcgctaccgggaaggccgtcggggcttttaccctgtagccgcgactcgtcgctccgtggccgaccgctcctgcccgcccccgtaggcggccacggatttccttgcgccttctagactggaagcgaacccgccgcatgaaccccgaacgagaaaccagcatgtcgagtcgcttcatcgccgcctggtccgcggccaaccgttgcctggaggtgcggggccgggcatggaagggctgaaactctacgcccgcttgctctggcggccgccgcgggaaaccctgctgttcgccctgcgcaccgtcgccgccgggctgctgaccctctacctggccttcctcttcgacctggagcagccgaagtgggcgctgatgaccgtggtcatcgtcagccagccgctggccgggatggctctaaagcgcagcttcgcccaggtcgtcggtaccttcgccggcgccgtggtggcggtgctgatcatggcgctgttcgcccagcaaccgttgccgttcttcgtcgccctgggactctggctggcgctctgcaccgccggcggcaccttgctgcgctacaccgattcgcacgccttcgtgctcagcggtttcaccgcggtgatcgtcgccgtgctgtcgattcccgatccggaaaacaccttcatgctcgccgtggtgcggctcaccgagaccctgctgggcgtcgcctgcgtggccctggtcagcctgctcagcgcgcgtccgcaggcggtggcgaagggctacttcgcccaggtcgatggcctgatccgcagtaccgcgcggcacgccgcggcggtgatccgcggcgacgagggcgacgagtcgttcaaccagcggcagatgcaactggtcgccagcatcaccgcgctggacggcctgcgccggcacctctatttcgacgcgccgaacctgcgccgcgccgatggcctggtgcagttgctgggcaacctgctggtgctgatggcctcgcggctgttgctgctgcgccagcatcgcctgctggtgcgggcgcactgggtcgggccgttgccggcggatatccaggcgctgctggatcgtgcattgcgggtgctggacgcgctggccgagcaggggcgggcggtaccctccgaggtgctggaggagttccaggcggtgcgccaggccttcgatgccgcggcgacgcgcgcggagtcctacgacgaggcgctgagcccggcgctgcgcccgcaggtggcgatcctgcgctgggaatacgcgcggctgttccagcgcctgggcgaagtgctcgaactcaacgatgcgatccagtccggccgccaggccagcagtttctaccgccgtggccaggcgcaggcgctgcacctggactgggcgctggcctcgatgaacgccgtgcgcgctttcgtcgccttgtcctgcgccgcctggctgtggatcaccagcgcctggaacggcgccctcagcagcctgctgctggtcggcgtgatgtgctcgctgatggcgaccttcccgcgtccgctgctggcggcgcagaacttcctgcgcgggctgctgctggcgatcctgatctcggcggcgctgctgttcgtgctgttgccggcatccgccgacttcgagtggctggcgctgtggatggcgttgctgctgtacgtggtcgcggtcggcctgagcagcccgctgagcgccgggatcgccatgggcatcggcctggagaccttgctgatggtggcgccgcagaatatcgcggtctactacagcaacgcttcgcagtggttcgagttcgtcggcggcttcctcgccgcggcggtcctcgccgtgctggtgttcgccctggtctatccgttccgcgccgacccgcgcctgcgccggctgctctacctgtcgcgccaggacgtcgcggaaatgtcgcgctgcgaggccagcgaggcgcagcgcttcgccttcgagacgcggatgatcgatcgcctggcggtgatggtcggcctgctgccggcgagccaggagccggctgcggcggaacgtttccagtgcgccctgggctgtgtggtgatgggcgtggcgttgaaccgcctgcgcgagccgctgcatgacgccggggtggtgccgctggagttgcagccgctgctgggcgaggcgctgcgcgaggtcgccgcctacatagccggcggcgcggacgccccgcggcaggacctcgccctggccgccctgcggcgtttcggccggggcctggaggccttgctggcgcagccgtcgaaggacctcggggcgacgcggcagcgcttcatcatgaatgtcgcggtactgatcctgcagcagtcgctgcaacgctatcggacgttgctggaggaggaccgcggcgcaccggcggtcgtcgaagaaccagaagaggagggcggacatgcccgctgatgtcgagatcgggggcgcctacctgccgccgatcgcccaggcgctgctgctggcctggctgatcctgctgctgctcaacccgctgttgcggcgcttcggcgtgttgcagcgggtctggcacgaagcgctgttccagggcgcgttgtactgcgcgatctgcgccggtctgatcctgtggatgggggagatgtcccgatgaacctgttgcaaggcaaatggccgcgcctggccaccctgctggcggtgctggtggcggcggcactggtgttcctcgcctgggaacgctacacccgcacgccgtggacccgtgacgcgcgggtccgcgccgatgtggtgacgctgtcggcggacgtttccgggctgatcacccggttgccgctgagcgacaaccagcccgtggagaagggcgcgctgctgctcagcatcgacccggcgcgctatgaactggcggtgctgcgcgccgagcgcgcggtgaacgtggcgcgggcggcgctgggcgagtcgcgcgcggcgatcgaggccagccaggcccagttgcgccagcgccgcagcgaggcgcagcggcgctcggcattgcagaagcgctcgatgctatcggtggaagagaacgaaaaggcccagaccgacgtcagcctggcccaggccgagttgctgaggaaccaggccagcctcggcctggcccaggccaacgtggagcttgccgaagccgccttgcagcaggcccgtctcgacctcgaacgtacccaggtacgcgccccggtcagcggctacgtgaccaatctgcagacccgcgaaggcgactacgcccacgccggggtgccattgctggcgctggtggaccgcgattcgttctatgtcagcggatacttcgaggagaccaagttgccgggcatccgcgtcggcagccgggcgcgggtggaactgatgagcggcgagcgcttcgacgggcgcgtgcagagcatcgcccatgccatcaccgaccgggagaatgccgagggctcgcgcctgctggcgaacatcaacccgagctatacctgggtcaagctggcccagcgaattccggtgcgcatcgccatcgatcccgcctatcgccagcgcaacaccttgcgcgccggcgtgactgcgaccatccgggtgctgcccgcggaggacaccgcgaaagtcgattccgcggcgcccgggactgccgtgcggccttgagtcaggccgaaccggtcagtctgtgccggtcatggctcagggttgttcgcggacgatttccgccagttgcaggatcaatcgctcgtcagcctggttgccgctctgctggcggaattgcctggcctcctcgcgggcgcgctggaaggccgcatcgacgctggcctggccatggctgtcgcgaatccacaggtagaggcccatgaccaggctctgcagggtggccaggtcgctgctctgggcgttcagcgcatcgatgagttgctgtttggaaaacgcttgcatggttgatctccgatcaatggcgccgcaagggcgcggttcgccccggcggtcgccggggtgcgcggagcatgtggaaagtgcggagaggctggccagcttaggccaagtcattcaaatgattagggaattttctgactttcagtgacctttcgactgttttcgacggcgggcgatcgctacgttttcatcgaaccgtcaccaaaacgtcatgaagacgcgcctagcattcgcggtatttcggcatgacgtggagagcagcgcatggactcctatggcgatacctcgggccgcatcggtcgcgactggctcgatcgacacgacgaagagctggagcaggaactgctcgacgacgagctgaacctggacgagctgttcggtcccgagcaggaggatgcgcccggcgagttgagtcggcgccgctatttccgcgaactgttccgcctgcaacgggaactggtgaaactgcagaactgggtggtgcacaccgggcacaaggtggtgattctcttcgaggggcgcgacgcggcgggcaagggcggcgtgatcaagcgcatcacccagcgcctcaacccgcgggtctgccgggtcgccgcgctgcccgcgccgaacgaccgcgagcagacccagtggtatttccagcgctacgtctcgcacctgccggccggcggcgagatcgtcctgttcgatcgcagctggtacaaccgcgccggggtcgagcgggtcatgggtttctgcaacgacgaacaatacgaggaattcttccgcagcgtgccggagttcgaaaagatgctggcgcgctcgggcatccagttgctcaagtactggttctccatctccgacgccgagcagcacctgcgcttcctcagccgtatccacgatccgctcaagcagtggaagctcagtccgatggacctggagtcgcggcggcgctgggaggcctacaccaaggccaaggaaaccatgctcgaacgcacccacatccccgaggcgccctggtgggtggtacaggccgacgacaagaagcgcgcgcggctgaactgcatccaccacctgttgcagcagatgccctaccgggaagttccgcagccgccggtacacctgccggagcgcctgcgccacgccgattacgtcaggcatccgacgcccggcgagatcatcgtgccggaagtctattgatggccgttcggccggacgccgggctggacgggtaaattcgcggcgggatgcgacgttactcaggcaagccccacgagtagccggccatgcttccgtctccagcctccagcctgtcgtttccgtcgcccctcgagcgccgcgaggccgatccatatgcccgctgcgacaggcatcggcctgcgtgcaacgagtcgcacgaaccggcgcaggagcgtcctgaacctgtcgcgacctgcgcattcatcgaggaggagcgccggcgtggcgatcccacgggcttgctttacgcccttgggccgcgggagcggggagagccggagcgggtggcggagtggttggcggcgctggtccaccatttctacctggacggtcccgttgagccgccgaggccaacgctgggaaaggcgcgctgcgaaaccgcgccgggcctttgccgctgctgcggccaacccttcgattttcgccacaagcgcgcggcgctgttgctgctgggaacccatttcgccgccagggccgaggcgcaggcggcgtcggtgcgccgctaccggcgctgaggaatgctcgccgccgtcagcggcgggcgctgagatgggtgacgttgtcgccctggcgctcggcggtgaccttgcggcagtgcaccagggcgtcgcggatcatgaagttgaccagggtcggcgagacgcccagttccttggcgatgtccttctgtggcacgccgtgcaggcggtacatctcgaaggcgtagcgggtgcgcttgggcagctcggtgagggcatccgcgatgtgttcgagggtcgcgtagttgatgtgcgaggtttccggcgaggcgccctggatcaccacgttcaggccttcttcctccggccccgagtatttctgttcgagcgcctgcttgcggtagtgatcgatggccaggttgcggacgatctggaacaggtagctgagctgtgccttgaacgacgaagtgatctgcggcgccgactggagcctgaagaacgcatcctggaccacatcttcggctcgcgagcggcaaccggtaatgcgggcggcgatcttcaccaggatcgtacggttatcgacgaatgcctggaggagcggggtatcgcatctgcgggtagacagttgttccgacatggaaatcaccttgctgcggagggggctgcagagcactggcggtggggtaagacccacacatggcgcaacaaattatgttgaatgataatgattgtcaattacgaagaaataaccaatctcacctttattcgtgaatggtccgcatgctggcaaatagccgctgcgaatgatggaggggagaaattcttcggcgtttcagaaggatggccgcgccaatgttgcagtcatgcgtcgcagacgaaatttttttaataatctttaggaatcagctagttagaaatcgttattgaccgcctcgccgctcctgccggcgttccgcgcaagaactgcgctaaggcgctgcgacaaccgttcccggctgctccatggcgtacatcgctatcgccgatgcggcgatagcgccgggcacaacccatcagaatggataggggttggcgtcctttcgcgcaatgctccgcggttgcccggagattgcggttacatgcgctaattatttgccgttgttatccgttcccctctgtgacagcgcgggcaggtgcccggcgccccggcgtgcgcagcaggagacggaaatgccgatcgatcatgggaaagcgctctgccccggacgagggccacgacagcggcgcaaggaggtcggcaggtgagcccggccgtttccctgcaattgttctgcctgccttattcgggggccagcgccacgctgttccgccgctggcagcccagcctgccgggctggatccgcttgctgcccctggaattgccggggcgcggccttcgcttcggcgaggccctgcataccgatgccgccagcctggtcgcgcaattggccggcgagctgcacggcaccctcgatagcgcttctccctacgccttcttcggccacagcctgggcgggctgctggccttcgaactggcccatgccatgcgtcggcgcggcctcgaagggccgctggcgctattcctctccggcgtatccccgcccgccgaaaacgatgtcagcggctaccggcgcgccaaggccgacgccgaactggtcgccgcgttgcgcgactaccggggtactccggaggccgtcctcaacgatccgtcgctgatgcagatgctgttgccagtggtgcgagcggactttctcgtcaccggcagctaccgctaccaggcgcatgggccgctggaagcggcgctgcacctgttcggcggacgcgaggacagcctgcgcagcgccgagttgctcggctggctgcatgaggccgggggcgacttcaccctcgacctgctcgacgggcagcactttttcatccgtgaacagcaggggcagttgctgcgcctgctgcgtcgctacgccggccagcatctgctgcgctggcacaaggacaaggtccggggaagcatgcgcgccgccagttgaggggcggccgcgacgactgtttccgggactcactagaactcgattgcaagccgaattcaggcaggaaaacacatgatggacgccttcgaacttcccaccaccctggtccaggccctgcgtcgccgcgctgtccaggagcccgagcgcctggcgctgcgcttcctcgccgaggacgatggcgaaggcgtggtcctcagctatcgcgatctcgacctgcgcgcgcggagcatcgccgcggccctgcaggcccatgcgcagctgggcgatcgcgcggtactgctgtttcccagcggccccgactacgtcgcggcgttcttcggttgcctgtatgccggggtcatcgcggtgccggcctacccgccggaatcggcgcgccgccatcaccaggaacgcctgttgtcgatcatcgccgacgccgagccgcgcctggtcctgaccaccgctgacctgcgcgagccattgctgcagatgaacgcgcaactgtccgccgccaacgccccgcaactgctctgcgtcgaccagttggacccggccgttgccgaggcctgggacgagccgcaagtgcgtcccgagcacatcgccttcctccagtacacctccggttcaaccgcattgcccaagggcgtgcaggtcagccatggcaacctggtcgccaacgaggtgctgatccgccgaggcttcggcatcggtgccgacgacgtgatcgtcagctggctgccgctgtaccacgacatgggcctgatcggcggcctgctgcaaccgatcttcagcggcgtaccctgcgtgctgatgtcgccgcgctacttcctcgaacgtccggtgcgctggctggaagccatcagccagtacggcggcaccgtcagcggcggtcccgatttcgcctaccggctgtgcagcgagcgggtcgccgagtcggccctgcagcgtctcgacctgagcggttggcgggtagccttctccggttccgagccgatccgccaggacagcctggaacgcttcgccgagaaattcgccgccagccgcttcgacgcgtccagtttcttcgcctgctacggcctcgccgaggcgaccctgttcgtcaccggcggccagcgcggccagggcattcccgccctggcggtggatggcgaggcgctggcgcgcaaccgcatcgccgaaggcgaaggcagcgtgctgatgtgctgcggccgcagccagccggaacacgccgtgctgatcgtcgacgcggcgagcggcgaggtcctcggcgacgacaacgtcggcgagatctgggccgccgggccgagcatcgcccacggttactggcgcaacccggaagcttcggcgaagaccttcgtcgagcgtgacgggcgcacctggctgcgcaccggcgacctcggcttcctccgcgacggcgaactgttcgtcaccgggcgcctgaaggacatgctcatcgtccgcggccacaacctctatccgcaggacatcgaacgcaccgtcgagagcgaggtgccgtcggcgcgcaagggcagggtcgcggccttcgcggtcacggtcgatggcgaggaaggcatcggcatcgccgccgagatcggtcgcggcgtccagaaatcggtgccggcccaggagctgatcgactcgatccgccaggcggtggccgaggcctaccaggaagcgccgaaggtggtggcgctgctcaatcccggcgccttgccgaagacgtccagcggcaagctgcaacgttccgcctgccgcctgcgcctggaagacggcagcctggacagctatgcgctgtttcccggcctccaggccgtgcaggaggcgcagccgccggcaggcgacgacgaactgctggcacgcatcggcgagatctggaaggcccggctgggcgtggcgcaggtagcgccgcgcgatcacttcttcctgcttggcggcaattccatcggcgccgcccaggtggtcgcccaggtgcgcgacagtctcggcgtcgccctcgacctgcgccaactgttcgaggcgccgaccctgcaggccttcagcgccacggtggcccgccaactggccgccggcctgccggccgaggcaccgatggcgcacctgccgcgcggtgtcgacctgccgcagtcggcggcgcagcagcgtctctggctgacctggcagatcgatccgcagagcgccgcctacaacatccccggcggcctgcgcctgcgcggcgagctggacgaagcggcgctgcgcgccagcttccagcgcctggtcgaacgccacgaagcgctgcgcacgcgtttcctcgagcgcgacggcgcggccttgcagcgtatcgacgagcggggcgagttcgcctggcagttcgtcgacctcgccgcgctggccgagcacgaacgcgccgcggctgccgcgcagcgccgcgaagccgaggcgcagcagccgttcgacctggaaaaggggccgctgctgcgggtcagcctggtgcgcctggacgaacaggagcaccagctctgggtcaccctgcatcacatcgtcgccgatggttggtcgctgaacctgctgctcgacgaattctcgcggctctacgccgaagcctgcggcggccagccggccgacctggcgccgctggaactgcactacgccgagttcgccgcctggcaacggcagtggctggacgcgggcgagggcgcccgccaactggcctactggcgggagcgcctgggcgacgcggcgccggtgctggaactggccaccgaccatccgcgcacggcgcgccaggcgtcgcccgccgcgcgctacagcctgcgggtcgacgaagccctggcgcgggctatccgcgaggccgcgctggaccatgaggcgagtgtcttcatgtggctgctggcggcgttccaggcgctgctgcatcgccacagcgggcagggcgagatccgcatcggcgtgcccagcgccaaccgccagcgcctggagacccaggggctggtcggcttcttcatcaacaccctggtcctgcgcggcacgccccgggcgcgccagccgttcgccgcattgctcggcgaggctcgcgaggcgaccctcggcgcccaggccaaccaggacctgccgttcgaccaggtgctcgcggcctgcggccagggcggccagttgttccaggtgctgttcaaccaccagcagcgcgacctgtcggcgttgcgccggctgcccggcctgctcgccgacgagctgccctggcacagccgcgaagccaagttcgacctgcaactgcagagcgaggaggacgctcgcggtcgcctgaccctgaatttcgactacgccgcggacctcttcgacgaggccagcatccggcgtttcgccgcgcaatacctggagctgctgcgccaggtcgcggaagacccgcagcgctgcctcggcgatatcgccctggtcgacgccgagcaggcggcgcacctcgccgaatggggcagcgcgccctgcgagccggcgcgcgcctggctgccggagctgctggagcggcaactggcgcagtccgccgaacgcgtcgccctggagtgggacggcggcagcctcggctacgccgaactgcacgcccgggccaaccgcctggcccactacctgcgcgacaagggcgtcggcccggacgtgcgggtagcgatctgcgccgagcgttcgccgcaactgctggtcggtctgctggcgatcgtcaaggcgggcggcgcctacgtgccgctggacccggactaccccagcgaacgcctggcctacatgctcgccgacagtggcgtcgagttgctactgacccaggcccatctgttcgaacgcctgcctggcgcggagggcgtcacgccgatctgcctggacagcctcaagctcgacaactggccgagccaggcaccgggcctgcacctgcacggcgacaatctcgcctacgtcatctacacctccggctccaccggccagccgaagggcgtgggcaacacccacgcggcgctggccgagcgcctgcagtggatgcaggccacctacgccctcgacggcgacgacgtgctgatgcagaaggcgccggtgagcttcgacgtgtcggtgtgggagtgcttctggccgctggtcactggttgccggctggtcctcgccgcccccggcgagcaccgcgatccggcgcgcctggtggaactggtgcggcagttcggggtgaccacgctgcacttcgtgccgccgctgctgcaactgttcatcgacgaacccggcgtcgccgcctgcggcagcctgcgccgcctgttctccggcggcgaggcgcttccggcggagctgcgcaaccgcgtgttgcaacgcctgccggcggtggccctgcataaccgctacgggccgaccgagaccgccatcaacgtcacccattggcagtgccgcgcggaagacggcgagcgttcgccgatcggccgaccgctgggcaacgtggtctgccgcgtgctggacgccgagttcaacctgctgccggccggcgtcgccggcgagctgtgcatcggcggcctgggcctggcccgcggctacctggggcgcccggcgctgagcgccgagcgcttcgtcgccgatccgttctcggccgccggcgagcgcctgtaccgcaccggcgaccgcgcgcgctggaacgccgacggcgtgctggaatacctcggccgcctcgaccagcaggtcaagctgcgtggcttccgcatcgagccggaggaaatccaggcacgcctgctggcgcagccgggggtggcccaggcggtagtggtgatccgcgaaggcgtggccggcagccagttggtcggctactacaccggcgctgtcggcgccgaggcggaagccgagcagaaccagcgtctgcgcgccgcgctacaggccgaactgccggaatacatggtcccgacgcagttgatgcgcctggcgcagatgcccctcggcccgagcggcaagctggatacgcgggcgctgccggagccggtctggcagcagcgcgagcacgtcgagccgcggaccgagctgcaacggcgcatcgccgtgatctggagcgaagtgctcggcctgccgcgggtcggcttgcgcgacgatttcttcgagctcggcgggcattccctgctggccacccgcatcgtctcgcgcacccgccaggcctgcgacgtcgaactgccgttgcgcgcgctgttcgaggccagcgaactggaggccttctgcgaacaggtccgcgcagcccaggccgccggacgtaccgacagccacggcgcgatccgccgcatcgaccgcgagcagccggtgccgctgtcctactcgcagcagcgcatgtggttcctctggcaactggagccggacagcccggcctacaacgtcggcggcctggcacgcctgagcgggccgctggacgtggcgcgcttcgaggccgcgctacaggccctggtgcagcgccacgagaccctgcgtaccacgttccccagcgtcgacggcgtgccggtacagcgcgtacatggcgatggcggcctgcacatggactggcaggacttctccgcgctcgaccgcgacagccgccagcagcacctgcagaccctcgccgacagcgaggcgcaccggcccttcgaccttgagagtgggccgttgctgcgggtctgcatggtgaagatggccgagcgcgagcactacctggtggtgaccctgcaccacatcgtcaccgaaggctgggcgatggacatcttcgcccgcgaactgggcgcgctctacgaggccttcctcgacgaccgcgaatcgccgctggagccgttgccggtccagtacctggactacagcgtgtggcagcgcgagtggctggagagcggcgagcgccagcgccagctcgactactggaaggcccagctgggcaacgagcatccgctgctcgaactgccgggcgaccggccacgcccgccggtgcagagccaccagggcgacctctaccgcttcgacctgagccccgagctggccgagcgcgtgcgccgcttcaacgccgcccgcgggctgaccatgttcatgaccatgaccgccacccttgcggccttgctctaccgctacagcggccagcaggacctgcgtatcggcgcgccggtggcgaaccgcatccgcccggagagcgaagggctgatcggcgccttcctcaatacccaggtgctgcgctgccggctcgacggacagatgagcgtcggcgagctgcttgagcaggtgcggcagaccgtgatcgatggccagtcgcaccaggacctgccgttcgaccacctggtggaagccctgcagccgccgcgcagcgccgcctacaacccgttgttccaggtgatgtgcaacgtccagcgctgggagttccagcagacccggcaactggccgggatgaccgtcgagtacatcgccaacgatgcgcgggcgaccaagttcgacctcaacctggaggtcaccgacctcgaccagcgcctcggctgctgcctgacctacagccgcgacctgttcgacgaaccgcgcatcgcgcggatggccggacactggcagaacctgctggaggcgctgctgggcgacccgcagcggcgcattgccgaattgccgctgttcgccgccgaggagcggaagcaactgctgctcgccggcacggccggcgaggcagggctccaggacaccctccatggcctgttcgccgcccgcgtggcggccagcccccaggccccggcgctgaccttcgccgggcagaccctgagctatgccgaactcgatgcccgctccaaccgtctggcgcgcgtcctgcgcagtcacggcgtcggcccggaagtgcgggtcggcctggccctggagcgttcgctggagatggtcgtcggcctgctggcgatcctcaaggccggcggcgcctacgtgccgctggacccggaatatccgctggagcgcctgcaatacatgatcgaggacagcggcgtacgcctgctgctcagccacgcggcgctgttcgaggccctcggcgagctgccggcaggcgtggcgcgctggtgcctcgaggaggacggcccggcgctggacgccgaggaccccgcgccgctggcagcgctgagcgggccgcagcaccaggcctacctgatctatacctccggctccaccggcaagccgaagggcgtggcggtctcccacggcgagatcgccatgcactgcgccgcggtgatcgagcgcttcggcatgcgcgccgaggattgcgaactgcacttctattcgatcaacttcgacgccgccagcgagcgcctgctggccccgttgctgtgcggcgcccgcgtggtgctgcgggcccagggccagtggggcgcggaggaaatctgcgagctgatccgcgcggagggcgtgagcatcctcggcttcaccccgagctacggcagccagctcgcccagtggctggagagccagggccggcagttgccggtgcgcatgtgcatcaccggcggcgaagcgctgaccggcgagcacctgcaacggattcgccaggccttcgccccggcgtcgttcttcaatgcctacggaccgaccgaaacggtggtcatgccgctggcctgcctggctcccgaacgactggaggagggcgccgccagcgtgccgatcggcagcgtggtcggtgcgcgggtcgcctacatcctggatgccgacctggccctggtgccgcagggcgcgaccggcgaactctacgtcggcggcgccggcctggcgcgcggctaccatgagcgtccggcgctcagcgccgagcgcttcgtgcccgatcccttcgctgccgagggcggccgcctgtaccgcaccggcgacctggtgcgcctgtgcgacaacggccaggtggaatatgtcggccgcatcgaccaccaggtgaagatccgtggcttccgcatcgaactgggcgagatcgaggcgcgcctgctggagcatccgcaggttcgcgaagcgctggtcctggcgctcgacagcccgagcggcaagcagttggccggttatgtcgccagcgcggtggccgagcaggacgaggacgcccaggcggcgctgcgcgaggcgctgaaaacgcatctcaagcagcaattgccggactacatggtgccggcccacctgctgttgctcgccagcctgccgctgaccgccaacggcaagctcgaccgccgcgcgctgccggcgcccgacccggcgctcaaccggcaggcctacgaggccccgcgcagcgtgctggagcagcaactggccggggtctggcgcgaggtgctgaacgtcgagcgggtaggtctcggcgacaacttcttcgaactgggcggcgattcgatcctgtcgatccaggtggtcagccgtgcccgccagctcggcatccacttcagcccccgcgacctgttccagcaccagaccgtgcagagcctcgccgcggtggcccggcacagccaggccagccaggccgagcaggggccggtgcagggcgacagcgcgctgacgccgatccagcactggttcttcgacctgccgctggcgcgccgcgaacactggaaccagtcgctgctgttgcagccgcggcaggccattgacctcggtctgctgcgcaagtccctgcaacgcctggtcgaacagcatgatgccctgcgcctggcgttccgccaggtcgacggcgagtggctggcgcagcatcgtccgctgcgcgaacaggaactgctctggcacgttccggtgcaatccttcgacgaatgcgccgagctgttcgccaaggcccagcgcagcctcgacctcgaacaggggccgctgctgcgcgcggtgctggtggacggcccggccggcgagcaacgcctgctgctggcgatccaccacctggtggtggacggggtgtcctggcgggtgctgctggaggacctgcaacaggtctaccgtcagttcgccgagggcgccgaaccggcgctgccggccaagaccagcgccttccgcgactgggccggacgcctgcaggcctacgccggcagcgaatcgctgcgcgaggagctgggctggtggcaagcccggctgggtgggcagccggtcgagtggccgtgcgaccgcccgcagggcgacaaccgcgaggcgctggcggaaagtgtcagcctgcggctcgacccgcaacgtacccggcaattgctgcaacaggcgccggcggcctaccgcacccaggtcaacgacctgctgctgaccgccctcgctcgcgtgctctgccgctggagcgggcagccgtcgacgctggtgcagttggaagggcatggccgcgaggcgctgttcgacgatatcgacctgacccgcagtgtcggctggttcaccagcgcctacccgttgcgcctgaccccggcgcagagcccgggcgagtcgatcaaggcgatcaaggaacagctccgcgcggtgccgcacaaaggcctcggctacggcgtgctgcgctacctcgccgatccggcggtgcgccaggcgatggccgcgctgcccacggcgccgatcaccttcaactacctcggacagttcgaccagagcttcgccgacgccctgttccagccgctggaccagcccaccgggccgatccacgacgagcaggcgccgttgcccaacgagctgagcgtcgatggccaggtctacggcggcgagctggtgctgcgctggacctacagccgcgagcgctacgacgcgcagacggtgaacgagctggcgcaggcctatctcgccgaactgcaggcgctgatcgagcattgcctggaagacggcgccggcggcctgaccccgtccgacttcccgctggcgcaactgagccaggcgcaactggacgccctggcggtgccggccggcgagatcgaggacgtctatccgctgaccccgatgcaggaagggttgctgttgcacaccctgctggaaccgggcaccggcatctactacatgcaggaccgctaccggatcgacagcccgctcgatcccgagcgcttcgccgccgcctggcaggcggtggtggcccgccacgaggcgctgcgcgcgtcgttcgtctggaatgccggcgaaacgatgctgcaggtgatccacaagcccggtcgcacccgcatcgagttcctcgactggagcgagctgccggaggacggccacgaggagcgcctgcaagcgctgcacaagcgcgagcgcgaggccggcttcgacctgctcgaacagccgccgttccacctgcgcctgatccgcctgggcgaggcgcgctactggttcatgatgagcaaccaccacatcctcatcgatgcctggtgccgtggcctgctgatgaacgacttcttcgagatctacggcgccctcggcgaaggccgcccggcgaacctgccgacgccgccgcgctaccgcgactacatcgcctggctgcaacgccaggacctggagcaatcgcgtcgctggtggagcgagagcctgcgctgcttcgagcggccgaccctggtgcccagcgaccgcccgttcctccgcgagcacgccggcgagagcggcgggatgatcgtcggcgaccgctacacgcgcctggacgccgccgacggcgcgcgcctgcgcgaactggcgcagcgctaccagctcaccgtcaacaccttcgcccaggccgcctgggcgctgaccctgcgccgcttcagcggcgagcgcgacgtgctgttcggcgtcaccgtggccgggcgcccggtgggcatgccggaaatgcagcgcaccgtcggcctgttcatcaacagcatcccattgcgcgtgcagatgccggccgccggccagcgctgcacggtgcgcgaatggctgaaccggctgttcgagcgcaacctggagttgcgcgagcacgagcacctgcccttggtagccatccaggaaagcagcgagctgcccaagggccagccgctgttcgacagcctgttcgtgttcgagaacgctccggtggaagtctcggtactggaccgcgcgcagagcctgaacgccagttccgactccgggcgtacccacaccaacttcccgttgaccgtggtctgctatccgggtgatgacctcggcctgcacctgtcctacgaccagcgctacttcgaggcgccgaccgtcgagcgcctgctcggcgagttcaagcgcctgctgctggccctggccgacggtttccatggcgaactggaggccttgccgctgctcggcgaggacgagcgtgacttcctcctcgacggctgcaaccgcagcgcccgcgactacccgctggagcaaggctacgtgcggctgttcgaggcgcaggtggcggcccatccgcagcgcatcgccgccagttgcctggaacagcgctggagctacgccgagctgaaccgccgggccaaccgtctcggccacgccctgcgcgccgccggcgtcggcatcgaccagccggtggcactgctggccgagcgcggcctcgacctgctcggcatgatcgtcggcagcttcaaggccggtgccggctacctgccgctcgaccccggccatccgacccagcgcctgacccggatcgtcgagctgagccgcacgccggtgctggtctgcacccaggcctgccgcgagcaggcgctggcgctgttcgacgaactcggctgcgtcgaccggccgcgcctgctggtgtgggacgagatccagcagggcgagggcgccgagcacgatccgcaggtctacagcgggccgcagaacctcgcctacgtgatctacacctccggctccaccggactgccgaagggcgtgatggtggagcaggcgggcatgctcaacaaccagttgagcaaggtcccgtacctggaactggacgagaacgacgtgatcgcccagaccgcctcgcagagcttcgacatctcggtctggcagttcctcgccgcgccgttgttcggcgcccgcgtggcgatcgtgccgaacgccatcgcccacgatccgcagggcctgctggcgcacgtcggcgaacagggcatcacggtgctggaaagcgtgccgtcgctgatccagggcatgctcgccgaagagcgccaggccctcgacggcctgcgctggatgctgcccaccggcgaggcgatgccgccggaactggcgcgccagtggctcaagcgctacccgcggatcggtctggtgaatgcctacgggccggcggaatgctccgacgacgtggcgttcttccgcgtcgacctggcctccaccgagagcacctacctgccgatcggcagtcccaccgacaacaaccgcctgtacctgctcggcgcgggcgccgacgacgccttcgaactggtgccgctgggcgcggtgggcgagctgtgcgtggccggcaccggcgtcggtcgtggctacgtcggcgatccgctgcgcaccgcccaggccttcgtcccgcatccgttcggcgcgccgggcgagcgtctgtaccgtaccggcgacctggcgcggcggcgcgccgacggactgctggaatatgtcgggcggatcgaccaccaggtgaagatccgcggcttccgcatcgagctgggcgagatcgaggcgcgcctgcacgaacgcgccgacgtccgcgaggcggcggtggcggtgcaggaaggggcgaacggcaagtacctggtgggctacctggttcccggcgagacacagcgttccagcgccgactcgccggccggactgatggtggagcagggcgcctggttcgagcggatcaagcagcaactgcgcgccgacctgccggactacatggtgccgctgcactggctggtgctggaccggatgccgctcaacgccaacggcaagctcgaccgcaaggcgctgccggcgttggacatcggccagatgcagaaccaggcctaccaggccccgcgcaacgaactggaggaaaccctggcacggatctgggccgaggtgctgaaggtcgagcgggtcggggtgttcgacaacttcttcgaactcggcgggcattcgctgctggccacccagatcgcttcgcgggtgcagaaggccctgcaacgcaacgtgccgctacgggcgatgttcgaatgcaccacggtggaagagctggccagctacatcgagtccctggccccgagtgagatcagcgagcagaaggccgagcgcctgaacgacctgatgtcgaagctggaaatgctctgatcggatccggccgccgagcccttcgcggggggcgatgaaaatggccggaagggaatgttccatactcccttccggccattcttcatatatgtgcgtatatatacgccgatatacgggtcggcttgattcattacaacgcgatattcccgactttcgccgaagccgcgttgtaacgctggtgctgtttacgcttgaccgaagaactgcgcttgaaacgccgggtcgccgtaaagatgttcttcaaggtaatcgggaataccgtgatcaatccgttgcccttgtgatattccgggttccgatcaaggaagaaacgcacatttggattgctgtgcgtagcccagcgtgcccgttcgtgatcggcctcggtggtggtccagccggtgtcgaccaccagcggatcgttgctgctgcgcttgaagctgaactgggcgatcaggtgttcgaggaacttcacgtggtggctttccaggtcgcagtggcagggccagacgtcgtctacgtacttggtcaccagggcgtagctggagggatggatcagggtgtcgaggaacagcaggcgcttgccggggttgagcaacttgtagcgcagcacctggcgggtaaggaagggaatgctctggttgctcccgcggtactccgggaggatccccgactcggcgcggatcacgcaggccttgctgtactggaagacttccgagtcgtggaaatgcacggcgcaatagccgacgatctcgtgctggcggttgcggtagatggcgatgcgggtgaggcgggcagtggagtggatgacctcgcgagcgaaggattcatactggacgccatgaaagatcctggcgtgaatcgcgtagagttcgcttgcgaggtttcccctctgtgtttcgtcgagttttcccgggttgacgacttcccggtagatcctggcagtcataatcttctccgaaggaatcatccaatattaattttcgaatttttttcatgccgatgacttcttgttgttgtgcgtggaggtgaggctagggaaagtctatttccatattgttaactggcgccgccatacgccttaagctgccagatctgacagggtattaacttatattcggaacttgcttcggctcgctgcgctggcggtcgctcttcgccgccggcctttattctttcgctgtccttccgggggggcagatgacgcagaacatctacgatcgcgacgacttcttcgccgcctgccggtcaacctgcacgccataccgctgtccggctggcggctggacagggagggatggtgcacctgctggaccgctactcgatcgaagggccgcgtaccaccgactggctggccagcggcgtggtcaagcgtcaccgcacgttgggcagcctgctcaacctgttgatcgggttcgggctttcgtctcaaacgggtggaggagtggagcccctgcgacgagcaagtggccgctcgcctagagcggccgcaacttgcgcaaccagcgtcgccaacccagttgcaccatgggttcgccctggcgttcgaggaggtcgggcatctcgctgaaattcacccagagcttgccctgccagtcgagcatgtgcaccacctggcgctcccagcgcaacttgacgtagcgcggcataccgctgtcgtcggtggcgctgcgcaactccggcaccacctcgccgctgagccagcggcgcaattcgccgccatcgccgcgctgctggtagatcagcgcggcatacgcgccggactcgctgatcagccactgcgcctggtcttcgccacgttcggaacgcaacgactcccggcgcgcctggtcgtcgtccaggcgggcgagcatctgttcgggctggctgtgttcgatgagccgggcgaagtcgtcgaggacgaaccaggcctggtcgtcgatcagcagcgcgcgcagcaatcgctgctgtcggaagaagtagtgcggggcaagctgggtatggccgtgcataggagaaatccttctctgagctgtccgctgcctggcttctgccggcgcggcagggagacaggccgctcgtgggtgttgggccagcaggctgtggcctgccgggaaccgaagtcgccggcggaaaaagcctactgacagcgcctgtaggacggcaatggctaagccttgtacgaagtctccgatggcacaagcccgctgaacagctaggccgttctgaacattacgccggcatggagaaaacaggggatggacgctatgcttgggaaccctttttttggtggttttttaaagcccttttagatcagagggttagagatcgctgcaaaaagagggtttttccgggctttggcgctggagcccttggaacttggaaggttgatggttttttggtctagttcactgccgtataggcagctaagaaatttcgggactgcggtctgtacgcggattgaatgttcactgccgtataggcagctaagaaatacgatgcagccaagggccggctcgcccaaatgttcactgccgtataggcagctaagaaaaaagtaaaagtcgaagccagacttcatacagcgttcactgccgtataggcagctaagaaagccatagtgtcagcccatccccacaaatacccgttcactgccgtataggcagctaagaaatcgtaatcattgaagtgtagtggtcaacccatcccggacagtgggttgagtttttcttcggccaccgcaggtggtaacccgtcgttgaattgatgcggcctgatccagttgtagcggtgcatcaagtaatgactgatgtcccgttgggcctcctgcgccgtcaggtaacccgttgacgggacccactccgacttcagactgcggaacaggcgctccatcggcgagttatcccagcaattccctcggcgactcatgctctgctgcatccgatagcgccagagccgttgccgaaacaggcggctggcgtactggctgccctggtctgaatggaacagcacctgctgtggcttgccgcgctgttcgtaggccatgtccagggccttgatcaccagttcggcatccggcttggccgagaacgcccagccgatcacccgccgggtatgcagatccagcaccgcggccaggtagtgccaacggccttgcgcccagacgtaggtgatgtcgccacaccacacctgattgggatgctcggtcgcgaattcgcggttcagccgattcgggatatccggccgctcaaccgtggcctgtttgtaggcgtgcgagcccggttgcttgctgaccaggcccagctcacgcatcaacctacgcactcggaaacggccgatggtcacgccctcttcgcgcagcatgcccagaatgctgcggctgccggccgagccccgactctggctgaacaactggttgacttggctgcgtagcgccacgcggcgagcatcgacacgccgccgtcgaagacggtggacgtagtagcaagaccgcgccacatcgaaagctgaacagaccacttccaccgactcctgctcactcaactggtctatcagcgcgtacgatcgagttcgtccgacatcaagagagcggtagccttttttaggatcgctttctcccgctccaaccggttgatccgggcttccagctcctggatcttttgctgctcaggcgtcaacgccttgctcttcggggtcacaccctggcgctccgcctcgagctgcttcacccaacggcgcaaggccgaatccaccacccccagcgaacggcaggcgtcgatatggctgtagccttggtccaacaccagggccgcggcctctcgtttgaactcggcggaaaacgtacgtcgttgcttgctcatcagacacctctctcacggcgaggattttcgcctaaatcggtgtccgggatcagtagaccactacaaagccccgggcaagctgaaagttcactgccgtataggcagctaagaaattacctttaaaaggctttaaaaggccttttaggttcactgccgtataggcagcaaaaaaatgtctcgaagttcataagcgggcttcgggcgatttcactgccacataggtcgtcaagaaacggccagcagccctgaagtatcgattgatgcggttcgctgtcggccggggtcaccagtcgaaacgaagtccctttccatggaacttcgttgcggacatgccgatgaggtgctgacggggttcttcagaaccagggaacggaacctcctttgctcaacccgtaacaggtgaatcctccttcctctgccgtcgcctgcaacggcccgtggcggatgaagagacggaagtgctgtccggtgctctggctgcgtagcgtgacgaagggcaggtccaaggttctcgcgaccgtatcgggaatgcgtttccgagcctcctcctcactcagatcgtgccggcgcatgagccgccgccgcagacgttccggattgcttttcgcctgaacccgactgacctgacggtacggtgtggggtgaggcacgactgccgcttctccgaattgcagatggtcccgcaacccttccagccagggccgggcgagcagggcatgaaggtcgtccgccgaggcatgaatgcgcaggcgttcgcccagccgggagcggctttcgtcgaggtcggggaagctcacgccgatcctgtccccgccctgtgccaccagggcctggtggagcttgccgaagagcacgctcatgagttgcgccgggggaaattccgggtccggtcgcaagcgaatgtcgaggtagtggtccatggcttacttctcttcggcttcaccgaacacgccgccacggatcaggttggcgatcacatagtgctgttgctccacggcgggcgcctcgtcgcgcagtacccagttgtcgagcagcgtatagaagtccagcttctgcttgggctggcgataggctttgccctgggacgtgacggagccgtagggctccacggcgatggggccgaggccatcttcgtcgggataccaggtatcgatggtgcgcagggcattgccgatcttctgcgagtggatggccgcggcatcgcgcacgctgtacagggtcttgctcttctggcctttcttgtcgcctttgtcgaggatcagttcctgggaggggaagacttcctggccatcgccgatacgggcgaaggcgaccacttcgagcaggacatgcccgctgcctgagaggccactggcgatcagttcagcgagcgcgtccagttcggcgtcggccttgaagtcgcgcaagccgatggccagggcgtcgaagcgccaggcgcgagccacctcgccctggcggatatggttgatacggacttccaccgcttccgcgcccacccggttgcgccacaggaagcgggcgttggccaggttgtgcgcataacgacgagccagctcggcgaagccctgctcgttcacgtaggtggcgaccgtttgcagcagcttgtcacggtaggccgcatcgttgcaggcagacggtgttccggcgccgccgagcacacggagggtgaagcggaccttgagggtgtcggcgtcgctcggcaggttggccacgtccaccgtctgcaggttgggcgactggatcgaggcgtccagcttggccgggtcacggtccttggtcttgaggcggttggagatggtgccgcgtacggacttctcgcgcagggtcacggccggccattcctgcgaggcgtcgcgttgcgcccaggcgccagcgctcataagggcgtcggaagggtcgagcttacgttcgaaggcgaggacggaagcggtgctcagtattggcttggacatgctgatttccttatgcgatggcgtgttcgacgaaacggggtgtgctccagcggtagagccctttgtcaggctcggcgtggtgataccaaagcaggtccgataacgcggcgacgcgatgggggctgagccattcgcccagaccgaagaggttttcgacgaagcgcagcggtgtttccctatcacgggcatttcgcacttcgccggggaggtacaggggtgacagggcgttgtagccagccgggatcggcaccagccagccgggcttgtcgcgcacttgccaggctgcatcgggcggcgatgcttcttcttcggacgaggttgcaggaggctcgaagttgattcgacaaagatcgagcagtgcatcgagcgtggtggcttcggggagcgtggtgcgcaaggtttccagatgttgttgcaacaacgcctcgcgactcaccagggcgaagccggggagcaggcggcgggtaagccggcgctggttcttgcgccgctgttcgtcgctgccacccagcatcagcagttcggcgttcggagccgggaagcgctcattgcaccagggcaggatgctgccaccggcgaggcgcatggcgccagcctgctcctgtacctgcctggcgatttcctgtgcggggtgatcgtccagaccatcgccatgcactcccagcagcagactgacctccagatgggcgcgcccttcttcgacgatggctgcggtggaaccgtcgcggttcagcggattgcgggtcaggttgaagaccttggtgcgcttgccggccggttgcgatatctgcgcttcgaagcggtgacagacgatgccgacaccgtccagttcgatatcgagggagattccgactcgacgctgcaaggcatggacgaatccggtgaaagcgccgggcgaagggaaaccccaggtcaaggggctggaaatggcgttggcgttctggatggacaggcgtggcagcaacagcagcgcctcgggatcagtcacgctcatcttcgagtatctccttgaacatcgtcagttccttgctcagctcctggctccattgggcggcttccgggctacccagtatctgactgtcgctgctgaccgcccggttcagccagttggcgaagcgatttccgacctcggcaggccagtcacctcgtagtcggcgctgcaagaacgtctcatcggtctgtgcgcgcaacggatcgagccagagctgctccgcgtcatgcagttggcacccgggggttgcgctccagccgggctccagttcgcgcagacgggcggcgtattgcagggcttcgtcgcagatttgcccgaccagttgggcgcgatatctgcggatggtgaaattgttatggcgggtcttggcaaggaggcgctgcaaggtccgggtcagccgggacacctcagggcttctcccgaagtcatgttcgaagaccgaggaatggcgtatcggtgcgcgctggtcctgtctttgccaatgtggcggaagcgaaggtagcaaccagttctccccatagcgctcgctgttcaactgactgatgttctgcggcttggtaccgccgaacttctggatcgccaggttggggtactcgctgaatccgtggggccatgactcctggcggctgcgcgcttcgcgtgccgccttggccgcgtcgccgaagcgcgcttcgcggagcagaccgtggacgtgatgcaccagactggtgggaaacagcggtgctagcaggtggtagccggaaccgggcaggggaaagtacaactgcttggccaggctgtgggacgcgggagcgcctttgacggccgtgatgccgatgaacgcttgccgccattcgcgagcctgttcggcgttatcggacagcgcctgtaatgcctcggcactgtcttctgtcagccagttcagaagatttttaccctgatactggagactgagaaacttgaatacgtccagcgccgcggcattgcccaccacatcgctgaccagcttgtcacctagctcatgggaaccggcgaggcccggttgctcgggtgcttgcggcaggctgtgcaggttgctgccgcgggcgtcgggatggatcggcttgagcgtgtgggtcaccaactgcaactggccaacccgccgggcggcatctgccagccaggcctcccgccggtgggtggccagcaatgtctggcgcttgtcgtcttcgtcgggatggagtttgtccagcttgccctggaggcgctcctggatgaaggattcgatgaactggcgaagctcctgccacgtaggcgttgggaggggagaggtcatccatgcctccttggtcgattgtcattgacgagtgctcgcattcgaaagctgtgctcctcagttgtatttcttgaaccccaaataagggtggtagctccatccctgggtgttttctcgcaatctcatctcgccgtagcgcatggcgcattgacgcaggtcgaggtcctcgcggccggccattgcgactagctcctcccgatagttgaccgtgccccatgtctggatgcgcgggccataggtgaggtcgaggttgcgcaacaggttgtcctggttgctccaggtcccttcttcgtagcggctgaaatgcaagcgctcctcgtcgtcctcgtccggcagcagggcgtagcatcgctccttggcgcctgcgcgaaatggttggctggtttgcagggcgccgctgagcgatgccggggtttgccaccagagcggtacgccgagcagggacgacggtgggtcgtcggcaagcatcagcgcgcgcaggcgtcggtgttccaggtcgaccaaccggctgcgtgggaacagtgggaacggttcgacgattcgtgggctggcgtcgatgcgggcgagtagggcggggtcgagcaggtcgtgcaggtcgtggctgtcaagagggaagtcgggggtctcgaagccgggccgctggaacgccggattctgcccttccagcgagcggatattgcgcgatagcaggtacaggttggcctcgccgctgaagccggagcgatggcggcggattcgcccggccaactggatgatcgagcgcatggaggagggttcgacgatggcccagtcgtaatcgtggtcgcgaccgacctccgccaccggcgaggcgagtacgacgaacagatgatcccgctccgtgctggcctggagcgccttggccagcgtcggacgagcgaacagcgcggcggcgtcgtcgtccgaacgcttcagcagttcatcgagttgtcgctcgatggccgagcggaccagaaggggatgccgcgaatggtagacacacagatggacatgcaacccctcgggcgcaccctgggcgaggatggcctgggccagttcgatcaggggttcgatgttggccagccgtaacaggccgaaactgatgcgacgtccttggtgttcggtgtgatggcagcgatgcaggtcagccatccaggtattcatctgcccggccaactcgcggcacagcgcgggacgggcctcgccagcggcatgcacggtgcatagctgcgcctggcgacgtggcggcagttgctcgagcttcgccagacgctgggcgacgaaggtcgcgtgcgcttcgctgaaggaggttacggcgccgtgggcgctggattgactggaaaactcgtcgaaccaggcgcagcagatttccgtagcgcgtccgggagcgccacgatggcgctggaagatttcccggccgctgcgataggcctcgaacaggccctgtaccaaggccggcggcagggtcgcggaggagagcagcacgcggctgccgaacaggccggcccagtgcaccagccgcgacagggcgggcaggtcgtcgatatcgaagtcgtcgacctcgtcgagcaccaggtcggaagtcatcaggcggagcagtggcgctatctggtgtccgccgcgcaggctttcgctggcgggcatcaggtggtcgatggtgcaggccaggatgggcgcctggagtaggcggtttcccgcgctgttcttgccgagccactcgcgtagagggccgtcctcgagcgtgccggcgaaatgtacatggctgttttccgccagcagttcctgggctgactcgctaccgctgcgctccaggcgctcctgctgcttttcgaacagttcgcgggcggcgctgccgccgaccaggatagcgaggtcgtcgtcgcccaggccgagccgctcgcggtaggcctgcccggtttgcagggtcaagctgcgcaggccgagagcgatgctgaaacgcgcgccgcgttgcggatcggccagcgcatacaggatgcggccgttggcgagggtcttaccgcaaccggtcgacgccaggttgaggccgaagaatccatgctccatagcctgctcgcggcaggccatcgcgcagtcgtaggccttgtcctgccagcggaagcgcggctgctcgacccggcgggtgaagcccttgtgccgggcaaggcgcggtagttgtcgctccaggcgtggcagggtgccggcgagcttgcgactgtgcagggcgacgccgagcaggtgttcgtccaggcgctgcttgagttggccgctgtcccggtcggtgttggcgtgcaaggggaagttcgggtcgcccagccgggagtcggcagggagactggaatagtggtgatccgcgagcatcaggatcagtcgggacacatgcatgacgtaggagtcatgcaacaaggcccgtccccgagccagcaggccgggacgctcgagcatgctctgcgcgcatagcgctgtcctggcgcgccaatgggggctggcgaagggcaggccgtgggggaactgccagcaggcggccttttcttttgcgtctgcgtcgcgtgcgccgcaccattggctctggatgggggccggcaagcgtgccagcgaggcgctgccgcgatggtccccgttgggcaggcgatgatggctgacgatcaaccagccgaccgcctgggcgagcggcggtagccggcttttctggaacgggccgggtggcgcgggttgccggtcgtccctggccagttgcgacagccaggcatcgcccgtctctcgcttgtccgccaggcgccgcagccagtcctcgtcgctgctgcctgggccaacgaaggcttcgaacaggcgcagtgatacccattcgtgacgataggcatcggccatcggtttgccgcggttccgcagtttggcctggaaggcctggctggccttgccgatatcgtggaacagcgctgccatcaccgtcagcaggcggatgtcctcggcgctgtgccagtcgttctcgtcttccttgcgcaggatgtcgcggcgggtcctgttggtcggcaccgcaccctgggcgttgaagcggctggcatcgccgacgatccacagcagttcgctgtggtcgcggccgcggatccagtgacaggctacggcggtgttgcgccgtgcgcttttcttcagcaggcgtcgcagggtatccagtcctgcttgagtgatgggcgtttgccaggtccgttcgccgcggcgttcggcgaactggtcgagaatgcggcgggtttcgctcagggcgcgcttttcgcattgcgacaccagcaggatgttcatgcggacaccgtgctccgctgcgccacgtctttcagcgtgtcgatcatgaagtccagggcctgtgcgcggctcaggttgtccaggcaggcctggcggaagtcctgttcctcgtcgccgcgcatggcggaaagaaatgcctgcggcaggatcagcgagtccttgaccaggtccgccacatcgaacaccaggcctccgcgccgggtcttgccgtgtagcaccgccagtccatggggaatgcccagcacccaggtggcggtcgccgcgaggccgtaggccaggtagttgccatggtcgaggaagcggttggccgggtcgccgccgctgccgcgcttggcgcggacgaactcgccgtagcgggtggcctgggctgcgagcttgaacaggcgcttgctcaggcgcgcttcttcggtcagtagatgctcatgattgggagcctgctccaacgctcgggcggaatcttccacggcaactgccagcgcggtggcatcgacggcgaagccggcgtcgcgcaatacgcggtcttccagccaactgtggcgaatccgctccagcctgacccgctggaagtgccgggcggcctccaggcgtttttcctcatcgaaccagaagccgacccagagctgcaggtattcggtggggcggtattcgctctgcggcgtcagccaggacacctcgacgtccacttcgttggcgctgaacagcggcgttccgccgccgccgcagaagcctaccaataccccggccctggccagttcgcgcatggctgcctgggtaatggaggtacccgtgcccagcaacaggctggtggtgttggcgatggggatgttccagtagtgcgaatgccggccttcgtcggtgacgtactcaacccgcccgccgttgaccagtacccggcagtgttgcaggtagtacaggttggcacgcttggagtgaaggatcgtcttcagttcgctgggagaaatgtcgtccatgttgaccgtggcctgtccctatcggatctatcgaattctgcgccaaggcaactgtttagcggatatggccgattgccgctaccccgttttcgtctgtatgaggagcgtgagcttccaagcggggcacattgtcgtggacgggcgaggctggcgggcggggtaggaactttatattcggatgtttggtagtgggatggagagggtggttctgcctagacggcagcgaccccggcggctgttgtggccgaggtgggttcgagtttcttagctgcctacacggcagtgaactctggagcgaggaggagatgaacggtgccggatttcttagctgcctacacggcagtgaacgtcatagcaggcccgcaacgcagtccctcccttttcttagctgcctacacggcagtgaacaggttcaccatggaagagcaccgatctgtaatttcttagctgcctacacggcagtgaacgtcatagcaggcccgcaacgcagtccctcccttttcttagctgcctacacggcagtgaacaggttcaccatggaagagcaccgatctgtaatttcttagctgcctacacggcagtgaacgcctggttttgcatgtcctgggccggcaggcttttcttagctgcctacacggcagtgaacgtcgacacggtactcgagcacctgggcggacttttcttagctgcctacacggcagtgaacgacatgccaggcccgaaagacccgaactgcaatttcttagctgcctacacggcagtgaactcgtcatccggcgcggcgcagaaccgcacgtatttcttagctgcctacacggcagtgaacaaagcgcaaacgatgggctaccgctactacattttcttagctgcctacacggcagtgaacatcatgaccgtcactggcccgagcgacatggatttcttagctgcctacacggcagtgaacggcgcgaacttcttctgcaagggattcaagtttttcttagctgcctacacggcagtgaacgactatgccattggcgttgacggtgaccgcactttcttagctgcctacacggcagtgaacgacttctacgccagggccgaggtctggaacgctttcttagctgcctacacggcagtgaaccacctggacgccgacagccgctatgccaagattttcttagctgcctacacggcagtgaacaccgtcccgtgccgtttgccgccgaagtggtatttcttagctgcctacacggcagtgaacgcctggagctgggcaccctgggcagccgcatatttcttagctgcctacacggcagtgaacttcgcattcgagaactacacccgcaccgcccatttcttagctgcctacacggcagtgaacggcatggccattgtggggctctccgggaatcatttcttagctgcctacacggcagtgaactctcgccggtggccttgatgggttcgtactcatttcttagctgcctacacggcagtgaacgaagccacctcccactgacctgccccccgatttcagtaccacgtcaaacttagtagagtccgttttccgagcaggagacggcagtgaaaaagcgttttaccgaagagcagattctcgacttcctcaagcaggcggaggccggtgtgccggtgaaggaactgtgtcgccgacacggcttcagtgatgcctcgttctacagctggcgggccaagtttggcggtatgaccgtggcggacgccaaacggttgaaggatcttgaactggaaaacagccgattgaagaagttgctcgccgaggcccacctcgacatcgagtcgctgaaagtggtcgcccggggaaaagggtaagcccgacagcacggcgggaggcggtgcaggagatgcaggcgcgaactggcatctccgagcgtcgtgcctgtcagttgatcgggctgtcccgctcggtgttgcgctaccagccgcgagccagtgtgcaaaacaccgagctgcaagcccaactggtggaactggcccaagagcgccggcgctttggctatcgccgcctgcacatcctgctgcgacgtgctggcgtgcaggtcaaccacaagcggatctatcgcctgtaccgcgctgccggcttgatggtgaaacggcggcggcgccgccatggcgtcgcggtggagcgcgaacgtctgagtttgccgagcgcaccaaaccaggtctggtcgatggacttcgtcttcgatgcactgagcaccgggcggcggatcaaatgcctgacggtggtcgatgacttcaccaaggagtcggtcggcatcctggtggagcacggtatcagcggctttcgcgtcacacgggcgctggacgagatggcgcggtttcgcggctacccgaaagcgatccgcaccgaccaggggcccgagttcaccggcaaggcattcgatcaatgggcctatcagcgcgacatcaagctgaagctgattcagcctggtaagcccacgcagaatgccttcatcgagtcgttcaacggtaagttccgggacgaatgcctcaatgagcactggttctgttcgctggccgaagcgagaatccgcatcgcggcctggcggcgggattacaacgaacaccgaccgcacagcgcgattggcaatctcaccccagcagaatttgctgcaagttggcgaactcgccagcagcagctgaagcaggaaaaattaatatcaaccccagggcctactaactaggcagcggtactaaaactgggggcaggtcaccgcagcagcgatgcggacaatttcttagctgcctacacggcagtgaacacacaggggcgccccatccggcgcaatcgagattttcttagctgcctacacggcagtgaactagcagtagccggtatcgaagttgtcacggcagtttcttagctgcctacacggcagtgaacagatgaggagagcagggcgccgaggcgtgggatttcttagctgcctacacggcagtgaactagctccgaaaacctataaccatttgaaggaaaaagaaataccgagtttttcccgccagaaaccctcttttttcgaggtctcgtaacttgctgatttataagggcgtaagaaatcgtccgaaaaaagggtcggaagcttcgggcaattggcggccgtttcgcgaggaccgggacggcgatcaagcgtgccgttcgggcgcgaaaggtcctgtgatgggcgatgccacaaagcccccggccaggccgggggcgtcgcgccggggagcggcgctacaggctcgggtggcccgcctcgatttcggacaaggcatcgctgagcagcgacagcaacgcaccgttgatgtaggccagggtgccgccgggctcttctttctcatcgagcaaacgggtcatggccaggatgttgattgccgatctcaagcgcactttcgcgttgtcgaacaagtgtgtggggagtgcatgggtgtccacgtacagggtggcgctacgcggacacatgtcggcctgggaggtgggtagcagcgggacgaagcggggggacgattctgttacctcggggttggacgtatcattcggcttagccatgggtcagctcctataagctggtttgtggttagcgggtcgtaggtgttcccgcacctgcggcccgcgtcttttttgccctcagaaaatagagggcagtgccgttcggtcctgtccctgcgggatggatttgccggcccctccatcatcctcctactgggtttttatccaattcccgggcttctgagagagcctgcggaaatgtccgggggagctgtccggcgtttccagggcctgtagggcgaataccgccacaggcggtatccgccgataccccggataagcggcggataaccgcgagcggttatccgccctacggagttgggacgctgtccggcgtttccggggtgcgtagggcgaataacgccatgggcgttatccgccgatatcgcggataagcggcggataaccgcgagcggttattcgccctacggagttggggtgctgtccggcgtttccggggtgtgtagggcgaataacgccatgggcgttatccgccgatgtcgcggataagcggcggataaccgcgagcggttattcgccctacggagctggggaggtgtcggcgtttccagggtgttatccgccgattcagaacgccagcaggtagcgcagggtcagttggttgccttcgctgcggttgcgcgcgccgctttcggcgtagaggttggcgaacagcgtttgcctgccctggctgtacatcacccccgggcctatgccgaagacctgctcgcgcgagtcggcctgccggtggtcgtcgatgcggtcggcgctgatctgtttcaactggtagccggccaggccgatccgccagtgcgggtccagcgcgtaggagatcgagaagttcgcgtgcagcgcctggcccggctgtacgtcgtttgcgcccaggcgcggcgaggggtcgtcgttgcggctgatccaggcgtagtgcaggcggccgctgagttccaggcgctcgcccagttcccaggtgaaggcgtagtgcgggttgaagatccaggtgttgctgccggtgttgatcgcggcgtccttgtcgtagtcgccggtgggcagggagaagacgaagttcaggcgctgccagtaggggcggccgaacagcgtagcgggcccccattgcagcatcagcggactgacgatcaggtcgccctggcgggtgcgccggccgtccgggccgccgtcgatatcgaggtccaggcgtaccagcggcagcagcacttcggcgccgtagtgggcgccgagcagggtgttctggctgaggtaggcgaagtgcggcaacagcgtggtgccacgaacccgttgccgtccgggaaccgaatgcccgccggcatcgctggcgttgttcgcccgaacgtattgcaggggcagttcgaagagcatgccgggacggctgacgccgtccatgaagctggtgttgccgagcgccagcggcggcagcgcgacggcgtcggcgtgggcctccaggcagagcgcggcggagagggcgccgaaggtgggtagcagggctgcacgcatgaggggatttctctttttctggttccgtgggttcagagcaacctgatcgggtagtcgaccaccacccggtattcgtcggagctggagttgccgcgggtgttgccgggggcggtgtagccttcgccggggcggtgggtggcccagcgcagggtcacgctgaggcccttggccgggccggcggggaaggcgtagcgcagcgacaggtcgcgttcccagtgctgggcgttcttgccattggggttgtagaggtagccatagcccgcgctgtccgggtcgacccgggtcaggtcggcctggccacggccgtaggcggcgccgaattgccagtccggggcggcgaggaaggccaggctggcctggtactggatcttccacgagcgctcgccggggccgttgaagtcggcgtactgcatggcgttgctttcgtagaggaaggtccggtcgttctgcgcgatgaagtcgaacggggtgtcgccatcgaccttttgcaggctgaggctcagcgactggccgccgccggccagggtcaggccggcgttgtagaggtcgttgtcgatccggccgagctggctgcggccctggtcgcgggtcttgtagtaatgcagccagggcgtcagggtcaattggctggaaagccgccacggctggctgaggccgaggtagtgctggttccagatatcctccaggcggccgctgtagagcgtcgcctggctgccgccgggggcgctgtagctggcgcccagccaggcgatgtgcgggctttcgcgatcggcggcgataccgcccttggtgccgttgccgtagccgctggtgagatgactgtggccgctctggttgcgcaggcgggtggcttcgacgaagccggcgtccagttcgagcgcgcggaaatggtagttcttcagggtcacgccacggtagctctgcggcaccatgcgactgacgccgctggcgatcactgggttctccagcaactggtcgccgatcttcagcaggctgtccaggccgcgcagcttgagggccgcgccggccgcggagaagctgtcggcggggcgaccggcggagtccagcggcagcacgccggcaccgccgctgccgccaccgccgtccaggcgcaggccgtagaaggcgtgcgcatccaggccgatgcctatcggcgtgtcggtatagccggagcggaacgacagcatcaggccctgggcccattcgcgctggtcgcggcgggacggggtgtcgtggttgtcgcgggcgaaatagtagttgcggaggaaaccgttcagcgtcgagccttcgacgaagcccggcggcaccttcatttcggctttctgccgctggttcaggccggtgctgatgttgtcgcgatggcccagggagtcgtcggcgagggtcgagcccggacctatggcaagggcaaggcagagcgtagccccgcgcttcatggaggaatcaggcatgggtccggtccgtagtcgttgctgtccaccaggctcctgctcggcaaaagaaggggcgtgcagccccttccttcccatggatcacttgcgctgcgaatccagttgctcgtggttgttgaccacggcctgggccttggcgtagctctcgatcagcagttggtagtgcgggaataccgcgctgtaggcttcggcgaactgcacggcgtcgtcgcggttccaggtgcgctggatttccgagcagaccgcggcggtgtccatcggcaccacgccggcctggaccacccgtgccagggtgatttcctgggccatcttggagtaggtgccggaggcgtcgatcaccgcgaacacctgatagccgtcgtgtaccgcggcgatgctggggaaggccatgcacacgctggtgatggtgccggcgatgatcagttgcttcttgccggtggccttcaccgcggcgacgaattccgggttgtcccaggcattgatctcacccttgcgcgcgacgtactgggcgtgcggcgcggcctcgtggatctccgggatcagcgggccgttggggccctgcggtaccgaggcggtggtgatcaccgggatcttcgccagggtggcgaccttggccagggtggtggcgttggcgcgcagttcggtcatcggcatgtccttgaccgtctggaacaggccgctctggtggtcgatcagcaacatggcggcgttggccggatcgatcttcggggtctggccgttgaagttggcgggagcgctcatttccatttcctcttgcagggtggtcgtccgtgaatttcgggcaaagcccggccgggcccgcgcttcctgcgcgggccatgtcgtaggggagcggacttcagtgggcgcggatgaagcgcccgttctcgaagtcctcgatggcctggtcgatttcctcgcggctgctcatcacgaaggggccatagccgatgatcggctcgtccagcggctcgccgctgagcaccagcaactgcacgtcgttgttggcttccagttccagccgcgggtcgtcgcggtcgagcagggcgacctgggcttcgcgaacgatctcgtcgccgaccgcgagggtgccgcgcaggaccaccacggcgcaggtatgtcccttgggcaggtcgagggcgaggtgcttgccggccttcagctgcacgtcccagaccgccagcggcgagtgggtcagcgccggcccctggtggcggccgtagcgtccggcgatcacccgcagttcgccggccctgtcgggcaggccgacgcggggaatgtcggcatccagcagggtctggtagcgcggcgggttcatcttgtcgctggagggcaggttgacccatagctggaccatttccagcgttccacctgtgctacggaagcgttccgagtggtactcctcgtggaggatcccggaggccgccgtcatccactgcacatcccccggccctatgcgtccgccggcgccggtggagtcgtggtgctcgacctcgccctggtagacgatggtcaccgtctcgaagccgcgatgaggatgctggcctacgccgcggcgctgctgtgcgggggggaaatcagcaggcccggcgtagtccagcaagaggaacgggctgatatgctggcccagtgtgttgtaggaaaagagcgaacgaacggggaatccgtcgcccacccagtggcggttggcgttgccgtagattcccaggacctttttcacgtcggtgctcctcgattgagtcgatggagcgatacgctagttcccgggagtgggaaccggtagtccgcaaatcaagtctcagagtctcgcaggtggaacgatgagtggtgagctggtgttcgatctgaacgcgcttttcatctatgccaaggtggtcgagcacggtggcttcgcccccgccgggcgggtgctggggattcccaagtcgaccatcagccgcaaggtcgcgcagctcgaggcgcgcctgggcgtacgcctggtgcagcgctcgacgcggcaattccaggtgaccgagatcggccaggcctactaccgtcattgcgtggcgatgacggtggaagcggaggctgccgaggacgtcatcgaacagaaccgctcggagccgtgcggaatggtccgcctgacctgctcgacgccgctgctgcacttcgaactggcgccgatgctggcgcgcttcatggcgcagtatccgaacgtcgagctgtatgtgaagaccttcaatcgccgggtcgacgtgatcgccgaaggctacgacatctcgctgtcgctgcgtttcccgccgctggaggacagcgacctggtgatgaaggtgctggcacgcagcccgcaggtgctggtggccagcccggagctgctggcccgctaccgcccgccggagctgccggccgacctgtcggcgatgccctacgtcggctgggagcgttcgcgcctggacggcagcctgcggctggtcggcgcggatggcagcagcgcggccctcaacctgcgcccgcaactgctcagcgacgacctcggcaccttgcgccaggcggtgctggagggcgtcgggatcggcggcctgccgctctgcgtggtcagtcgcgacctggccgagcgccggctggtgcgggtgctgccggagtggacgccggtggaaggcatggtggtggcaatgttcccttcgcggcgcgggctgttgccttcggtccgcgcgctgatcgactttctcgccgcaggcttcgccgacgccgcgcagcgccagtacccggcgccgggctgaggctcagcgaccggcgcccgggtcgtagagtcggagcagttgcagggtcacgccgttggaccagccgaagccgtcctgcagcgggtactcgccaccgccgccgccgccctggttgccgctgatgtcgtatttctccaccagttttccttcgaggtcgtagacctgctgcacctgggcgaggaatcgccggccgatgtcttccgccagggcgtcccggccgtaggcgcgcaggccctgtacggcgacccactgcaagggtgcccagccgttcggctcgtcccattgctggccgctggcacgggtggtggtggccagtccgcccgggcgcagcagttgggcggcgacgctgtcggcggtacgaccggcgcgttcggcggaggccagcccggtgaatagcgggaagaggctggcggcgttgatccgctcgatgggccgccggcgttgccagtcgtagtcggcgtagtagcccgccgggtgccagaggtggtcttcgatggcctgtcgtcgcttctccgcgcgggctccgtagccttgctcgcaggccttcagcgcgctgctggcgcaggccttggcgatggttcgttcgagatggtagagcagggcgttgaggtccaccgggacgatggcggtggtgcggatgctggccagttcgcggccgtcgtccagccagcgggaggagaagtcccagccgctttccgcgccggcccgcaggtcgcgatagacctcgcccgcggggcgctgcggggcgcgcgcggcggtcgcccggtcctccaggaaggactcctggcgcggtgtgtcacggttgtcccagtagcggttcagcaggcttccgtcggccagtttcaccacgtgcaggcgcgcctcgttggggcgcagcccggcggagccttccatccagtaggcgtattccttctgtagctgcggcaggtagcgccggtaggcggcgtcgccttcgcgtcttgcctggaggtccaccatgtaggcgaagaacggcggctgcgaacggctcaggtagtagctgcggttaccgttgggaatgtgcccgtaggtatcgatcaggtaggcgaagttgtcgagcatgtcgcgcacccgctggtgctgcccgctctccgcaaggccgagcatggtgaagtaggagtcccagtagtacacctcgcggaagcgtccgccggggaccacgtagggtttcggcagcggcagcaggctgctgtgggccggcacctgctcgtagtggcgggtcaacgccggccacaggtcgctgatgtggctggcgagatcggcgcccgcttccggcggggcggtctcgacgctgccggactcctcgaagttgcggccgacgaaggcgcgcaggtcgaagccgggccgctccctctcgcgcaggtagtcggcgcggatccgtgcaggctcgcgcagcgggagcgcatcgacgaagtgcttctggtcgctgaacagccggctttcctgcaccgcctggaacagctcgggataggcttcgtcgggggcgatcgcgcgttcgccgctggcgtcctgccaaccccaggacgaggacgcgggcggggtaggcgccgggccctggctgcaggccgccagcaggagcaggacccaggctgcgagcatggcgcggggcagagcggttcgatcaggcatcggctgtctcctcttcggcaaacgccgggcgcggatcggtcgccggcggggtgcgcctggggcggcgcggcaacccggcgggagggccgggaaggtcgctacccctgtttcggtgagtcgcggcgcacgaagttccatcggaaggatcgccagcgtacctatcgcttccgacaggtccttgcagatgaactccagcgcttcgcgcaggtccgtcgcagaaggggcgcgagccccccagtcgccgtttcgccgtgccgttccccgctgcccgcgccttgcgcagggcctcggcggttcgaatctcctgcccgtcccttcacgtcgggaagcctgcgtttcccgagaggagtgtttcgcaatggccaccgcactacgcttcagaccgctggacgccttctacaacgtcctcaacccggttcccttcggtttcttcgtcgccgccctggtcttcgacgccacctatttcgccacggcggaggtgatgtggggcaagagcgcggcctggctgatcagtctcggcctgctgttcgccatcctgccctgcgtcgtcgacctgtgccgcgtatggttgctgcggcgcgcggcggtcgtcgcggcggccagggtttcctccttgctgaagttcgccggtatcgtcctggccatcttcaatgccttcgtgcacagccgcgacgcctatgcggtgatgccggccgggctatggctgtcgatcgcgacggtgctgctgctggcgctgggagaggcgctcctggcggtatccgcggaggaggtggcgcatggctagcctccactcgctgcgccccgtcgcgcttgccctcggcctggtcctggccggctgcaaccaggggtcgcagaacgatccgcagcagcagaccggcgccaatccggcgcttccggaaccgaagcacttccttctgccgccgatgaaggtaccggaaggcgtgggctggtcgggagaggccaagccgacggtggcccagggcctgaagatcgagaagatcgccgatggcctgcaacaccctcgccagttgctggtcttgcccaacggcgatgtgctggtggtggaggccaactcgcccggcaccgcgccggtgaccacgccgaagcaactcatcgcggggatggtcaaggggaagtccggcaaggccggcaagggcggcaaccgcatcaccctgctgcgccgagccggcgccggaggccagtggcagaagtacgtgttcctggaagggctggactcgccgttcggcgtgcagcgggtgggggattacctgtatgtcgccaataccgggaacatcatgcgctaccgctacgtgccgggtgaaacccgggtcgccgacccggggatggagttcaccgacctgccggacaccatcaaccaccactggaccaaggcgctgctcgccagtcccgacgggcgcaagctctacgtgggcgtcggttcgaacagcaacatcaccgagaacggcgcggcgatcgaataccgtcgtgcggcgattctcgaggtggacgtcgccagccgcggcagccgcatctacgcctccggcctgcgcaacccgaccggcctgcagtgggaaccggtctccggcaagctgtggaccatcgtcaacgagcgcgacgagatcggcaacgacctggtcccggattacctgacctcggtacgggagggcggcttctacggctggccctacagctacttcggccagcacctggattcgcgggtgaagccgcagcgtcccgacctggtggcgaaggccatcgtccccgactacgcgctgggttcccacgtggccgcgctgggcctgttcttctacaccggcgacgagttgcccgagcgctatcgcaacggcgccttcgtcagcgagcacggcagttggaaccgctcgccggtcagcggcttccaggtggtccatgtgccgttcgccgacggcaagcccgccggtgcgccgcagccggtggtgaccgggttcgtctccgcggacgagaagcagttgtttggcgcgccggtggggttggcgcaggcggccgacggggcgttgctgatcgccgacgacgtcggcaacgcgatctggcgggtgagcgccgcgggcgccgactagcggcctgctcgacggtgtccgggccggagctggcggtccgggctcggtgctgcggtccggcgcagtaaatccgtgcgtccctcctgcgtctcctgtgcatccgatccgcgaatgccgcccctggcggccggatcgccggttgccagtggaacaccaccacgccttgagggttgaagacatgcacgtcgccaccagcgtcatcgaagaccagccgctccgcgccaccccggcggagggcgaaacgctctacgagttctcccagtcgcccttgctggaacggcaaagccgccaggagtccaacgcgcgcagctatccgcggcggattccgctggcgctgaagaaggccagggggctgctggtggaggacgtcgaggggcgtaccttcatcgattgcctggccggcgccggcaccctggcgctggggcacaaccatccggtggtgatcgaggcgatccgccaggttctggccgacgagctgccgctgcacaccctcgacctgaccaccccggtgaaggaccagttcgtccaggacctgttcggcctgctgccgccggcgctggccgccgaggcgaagatccagttctgcggcccgaccggcaccgacgcggtggaagccgcgctgaaactggtacgcaccgccaccgggcgcagcaccatcctgtcgttccagggcggctaccacggcatgagccagggcgcgctggggctgatgggcaatctcggaccgaagaagccgttgggcgcggtgctcagcacgggcgtgcagttcctgccgtatccctacgattaccgttgcccgttcggtctcggcggcgaggcgggggtcaaggcgaacctgcactacctggagaacctgctgaacgatccggaaggcggcgtgcagttgccggcggcggtgatcgtcgaggtggtccagggcgagggcggcgtggttccggccgatctcgactggctgcgcggcttgcggcggatcaccgagcaggccggggtggcgctgatcgtcgacgagatccagagcggcttcgctcgtaccggcaggatgttcgccttcgagcacgccggcatcgtccccgacgtggtggtgctgtccaaggccatcggcggcagcctgccgctggcggtggtggtctaccgcgaatggctggacaaatggcagcccggcgcccacgccggcaccttccgtggcaaccagatggccatggccgccggttcggcggtgatgcgctacctgaaggaacacgacctggcggcccacgcggcggccatgggcgagcgcctggccgagcacctgcgcatcctccagcgcgactatccgcaactgggcgatatccgcggtcgggggctgatgctcggggtcgagatcgtcgacccgcagggcgaggcggatgccctcggtcatccgccgaccgacggcgccctggcctcgcgggtccagcgcgagtgcctgaggcgcggcctgatcctcgaactgggcggccgccacggcagcgtggtgcgcttcctgccgccgctgatcatcggcgccgaacagatcgacgaggtggcccggcgtttcgcccgcgccctcggcgcggcgctggccggctaattttcccgccgggcttttcgttatccaacgcaagggccgtgctgcgcgcggccgttcgatcccatcaggagcaagcaatgacttcagtgttcgaccgtgacgacatccagttccaggtagtggtcaaccatgaggagcagtattccatctggccggaatacaaggagattccccagggctggcgggcggccggcaagagcggcctgaagaaggactgcctggcctacatcgaggaagtctggaccgacatgcgcccgctgagcctgcgccagcacatggacaaggcggccggctgagtgggcggtacgcccgtacggctgttctgcctgccgtattccggcgccagcgccatgacctacagccgctggcggcgcaagctgccggcctggctggcggtgcgtccggtggagttgccggggcgcggggcgcggatggccgagccgttgcagaccgacctggcgagcctggcgcagcaactggcgcgcgagctgcacgacgaggtccgccagggcccctacgcgatgctcgggcacagcctcggcgccttgctcgcctgcgaggtgctgtatgccttgcgcgagctgggttgcccgacgccgctggggttcttcgcctgcggcaccgcggcgccgtcgcgacgcgccgagtatgaccgcggtttcgccgaaccgaagagcgacgccgagctgatcgccgacctgcgcgacctgcaaggtacgccggaagaggtgctgggcaaccgcgagctgatgagcctgaccctgccgatcctgcgcgccgatttcctgctctgcggcagctatcgtcaccagcggcgcccgccgctggcctgtccgatccgaacgcttggcggcagggaggacaaggccagcgaggaacagttgctggcctgggccgaggaaacccgcagcggtttcgaactggaactgttcgacggcgggcacttcttcatccatcagcgcgaggccgaggtgctggcggtcgtcgagcgccaggtcgaggcctggcgcgcggggcagggcgccgcggcgttggcggtggagtcggcggcgatctgctgatgcccgcgagggcgccataggccctgcggcgggtccgatgtcgacgaaaaaaaggccggggagcagcgctccccggcctttttcgttacgaggcgcggctcagcctttaccggccagcagcccttcgactatcgctttcatgtcactttccaggccggccaccgggtccgccgcctcggtgtccaccactatcaggcgtgcgccgctggcggcgatggcatcggcgaggggcttgggtggttggcgatggtgcaggaccagggcgatatcctcgctcttcagctcctcggcgaaagcctggatattggtctcggtccagccgtcgtcggcctggatctccacgtccagcgggtccaggttgagcccggcgagcaggtagccgaggcgttcggagaggctgatcacgctgaggttgtcggccttcgccaggcgagtctcgttactggcggtcgcttccagcaattgcttcttcagcgtcgccaggttggcctggatggtcgctgcggcgccgggcgccaggcgttccaggtcgctggcgaggacatcggccatgcgccccaggttggtcgggttgagccaggggtaggcatgcaggtcgctgccggggcgcagggcgatgccgggcagggcgccgtccaccggacgcgcggcgtcgatctcgacgatacggatattgctacggcgggccagcgggtatagcgggtcgtcgctccagatcgagcgcaggtcgatcaccgcgtcggcctgcccggcggccttggccaggccgccggcgccgcgcccggcgaagaacgaggcctggcggctggccggcaggttggccggggcgacccgttgcagcttgacctcggtgtcccgcagcaggcgttcggcgagggcgtgggtgaccggcaggctggccagtaccgtgactggcgcggactgggccgcggccggcgtcgcggcgagggccgggagcgggccggcgagtccggcgcaagccagggccagggcgaggcaatggggtttcaggttcatccgggggttcctttcaggtgcggcaggcagccgcgagcgatggcggcgaggccgaaggccaggccggcgaccaggatgatcgcggcgccggagggaatcggcaggtcgaacatgatcggcaacaggataccggccagcgtgctgacggtggcgatcagcaccgccagccagaagaaccctttcagcgactggctgaccaggcgcgccgctgccgccgggatcaccagcagggctccgaccaggatcgcgccgatcactttcaccgcggcgacggtgaccagggtcaccagggccacgaacaggtagtccaggctcttcaccgcgaccccgcgcaccgccgccagttgcgggttgaagctggccagcatgatgcggttgtacagcggcagggccaggcacggcaccagcacggcgaccgccgccagcaccgcgaggtcatggccgttcacggtcagcaccgagccgaacagcacgttctcgaggatatgcacgttgatcttgcccgccagcaccagcaacaggctggcgccgagcgccagggacaccgagaggaacaccccgatcagggtgtccggggccaggccggtgcggttgcgcaggtagttgagcaggacgccgaacagcaggcagtagccgaacaggctgccgtagggcccggtgtagggctcgccgaggaggatgccgatggccacgccggtgagcgcggcgtggccgaccgcctcggagaagaaggcgaagcgcttgaccaccaccagggtgccgaggccgccgagcaccgggccgatcagcaggccggcgaggagcgcgttgacgacgaagccgtaggccagggtctccggcaggtagccggcggcggcccaggcctggacggcctggcgcagttgttcgtaggcgtcgttcatcggctggcctccgcgttcttccggggctgggtggagaacagcgtgagcaggcgttccggggtcaggctgctggccgccggaccgtcgaacagcaggtggcggttgagaccgctgacccggtcggcgaggcggccgacggcctccaggtcgtgctcgatccagagcacggtgacgccggcctggcgccagtccagcagcagccgctcgaagacctggatgccgccctcgtcgagggccgacatcggttcgtccagcaccagcagttgcggcggcggtaccaggccctgggccagcagcacgcgctggcgctcgccgccggagagggcgcccatgcgccgaccgcgcttggccagcatgccgacccgttccagggccgcgtcgatcgccgggcgccggctgcgcgacaggccgaggaaggccggacggcgctggcacatggcagccatgaaatcgtcgacggtgagcggcaggccgcggtcgaactccagcgcctgcggcacgtagccgatgcagccgggcgcgccgggccactccaggcgcagctcgccgcgatgcggcatctgcccgagcagggtcttgaccagcgaactcttgccgccgccgttcggcccgaccagcgcgtgcacgctgccggcctcgacgcgcaggcgcacgccatcgaggatgcggctgccgccgaggctcaggtcgatcccggcgaactcgatggccggcccgcaaggcgtggcgcaaagccgttcggccacggtcatgcgccggactcctggatggcgcggaccacggtgtcgaggttgcgcgccatttcttcctcgtacttgccggcgctgtaatcgccataggaaatgtgcgacagcgaatagagcttcaccccggactcgcgctggatggtctcgacgtaggtggaggggaagtcgatctcggagaagatcaccttcacgtccagcgccttgagctggtcgatggtcttcttcaactggctcggactcggctcgatgccgtgggccggctcgaccacggcggtgacttccaggccgaattcgcgcagcaggtagtcgtaggcgccgtggatggtggcgacgcggaagtcggcggccggggccttgttcagccgcgccagggcgtcggcgcgcagggcccgcaggcgcttggcgtaggcccgggcgttgcgggtgtaggccttggcgttggccgggtcgagcttgcccagttcgcgggcgatggtgttgacctgggtgatcgaggcgctgatggacaggaaggtatgcgggttgaccaccttgccggcgccgcgcgcggccatgccggtggcggccagcagcggcaccttggcgttcgcctcgatcaccgggatgccgggcttttcgctggaggcgatcatgcgctcggcgaaatcgtcgtggccgacgccgttgagcaccaccacgtcgagcgtgccgatgcgcttgatgtcctcggcgcgcggctcgtaggcatgcgggttgaaaccggcggggatcagcggcaccacctcggccttgtcgccgacgatgttgctcacgtagctgtagtagggatgcagggtgatgccgatgcgcaggcgtttgccgtcttcggcctgggccagcggggcgagcagggccagcagcagggcggccagcagggcacggcccgggaggagggcggcgaggccgcgcggacgggatgagcgacgggagaacagcatggaaaaacgccttctgtggagtcgatgtgcgatcaatggcggtgctgacgggtcacgccggcgtcgaagcggctgaccacctggcgccagccggcatcggccagggcgcgggcgtcgcccggtacggcgccggcagcggccgcggcgggcttcagccagacttcggcggggccgagcagcaggaggaacgagccggccaccccgggcttgccgctgacgcccaggtagctcggacgcccggcggtttcgccgcggctccagcggtgctcgccgcgactgctcgcggcgacgtcggcgacgaagggcgggaagccctcggcggccagttcgtcgacggagggcgcggcttcgccgtcgtccaggcgcgcctggatgtcttcggcggcgacctgcaggtcggcgtagatgccctgttcggcggcattcaggtcgagccgggcgtccacctggtgggcgtccagggcttgcgcttcatgggactgctggcgcagcccgaccaccgtggcggcgagggccaggatcagcacactgccgagcagtacgtagagggtctcgtggccggcgccggccgggcggacggtttcgacgctcatggcgcggcgatgtcggcgtggtcgatttccaccacgtggccggggccggcgtcgaacagcacgtagaactcgccgtcgggacgcttgaaggtcagggtcgagtcggcgccgagcttgccgggaaccaggatctgctcgtcgtagccgatcacgtcgagggttacgccgggggcgccgctgccgtcggagaagccgcccttgcagcggatctcgccggcctgcacttcctcgcattcgcagatcgggttgtgcgccagggccgcgccgctcaggccgagcaacagggcggccaggggcaggcgccaggggcgggtgtggatgctcattgcttacctcgtttgttcagccaggccacggtggcgggggatgcctcggccaggggaatggaagcctggtgcatggagccgtcccaaccttccatggtgatccacagctcggcgtcgggccgggtgcgcggcgggatcggcacgctggtgcccatgcggtaggggctgccgaagaagatcaccccggcggcacgcaggctgcgcggcttgccgatgcgcaggtaggtcgccttgacctggggaatgcaggcctggcagagggcggcattgaagtccttcatgaagccggcggggccttcgtcgtgcggcggttcgatacgccattcggcgagcttgagactccaggggcctacctggacttcgccgatctcgcgttcacccagtccgctgctgccagagaacaacgccatgtcggcgaaataacgtggcatgaagccgagcgggatcaggatcagcagaacgttcaggtggaaacgccagcgcagccagaactggcgcagcggcgaaacgggctgggcgacggcggccttgctcatggctgtccctccgcggtctggttggccattaccggcgccggcttggccggtttcggctggcgcgccgggcgcttgccgcgcttgaccagcgcggcggtggcctgtgcggtgcgcttgctccagatcagcaggccgctgagcaccatcatgctcagcagcaggccgaagacgaaccagatcagcttgacccagataccgccgaaatcgccggtgtgcagggggcgcatggattcggtgacgaactgcaggggggtacggtcgctgagcaggcgggtggtttcgatcttgcccgtataagggttcagcgcggccgactggaacatgagcggataccagccgcgtccggccacgaacatcgggctgtaggcgttgccgggcaggaacaccgcgctggcctccaggctggggatgcgcccggtgacgagccgcaccgcctcgtccagctcgatgtatggaaccttctgaccgggtgcggcgcggggcacgtcggcgcgtgcgatgaccggagggatgccgtcgttggtcagggtgacgtggttgtcggcaaggatggcctggatcaggaaccaggtgccggtaatggaaatcagggcgatgaaccagatcgaccagatgccgctcaggcgatggaagtcgccccagaagatccgggcgccctggttgatgcgtaatctgggtttgagaaagcccttccagaatcgtttatagaccaccagcccggtgatgagcgatgccagcatggggaggccgagcagcgagaccatgtaccagccccagctgtagccgttgttgaacggaaccagccaccatccgtgcagggcacgggtgaactgacgaaagtcgaaggaggggctttcgccctggatggcgccggtgtaggggttgatgtacagggtcgcctcgctgccgccgggatagctgacctcggcagtaagggcgaaatgctcttcgtcggggcgctggatggattcgaccaggaggtccggttgggcttcgttgatcgccttcaggacctggctgaagctgagcggctcggcatcttcgtagggcttgctggcccggacgtccgggttggccagccagacgatctcttggctgaccaccgccagggtgccggtgacgcagacgatcaggacgaagaaccagatgggcagggccagccagctgtggacgaggaaccagagtctggagcgggactttttcgacatgaggctaacggtaggttaggggtcgtgggcaccgaccatgggttgcggggactggatgcgccccgttcatccatataggacgaatgaggccggtagaacctgaaggggaagatgaaagcaaatgtttcgcagttgctttcagcctggcgccggcggcttgtccgagggcttccgtaagcgcctgatggctatgcaaaaaaccgatcggccaaggtgcgaccggaagtcgctgtccggttaattttcacgatgtgtcgtccgtttcacatgaatgaccgagccccgcgctcgttgcccatgtgcacggaagaagaccgatgaacgcagaagattccctcaagctcgcccgccgctttatcgaactacccgttgagaagcgtcgggtcttcctcgaaaccctgcgaggggagggaatcgatttctcgctgttcccgattccggccggcgtgtcttcggccgagcgcgaccgcctgtcctacgcccagcagcgcatgtggttcctctggcacctggagccacagagtggcgcctacaacctgcccagcgcggtgcgcctgaacggaccgctggatcgccaggcgctggagcgcgccttcgccagcctggtgcagcgtcatgaaaccctgcgtacggtgttcccgcgcggcgccgacgacagcctggcgcaggcgcccctgcaacgcccgctggaggttgccttcgaggattgcagcggcctgcccgaggccgagcaggaagcccgcctgcgcgaggaggcgcagcgcgagtcgttgcagccgttcgacctgggcgaggggccgttgctgcgggtccgcctgatccgcctgggcgaggagcggcatgtgctgctgttgaccctgcatcacatcgtgtccgacggctggtcgatgaacgtgctgatcgaagaattcagtcgtttctacagtgcctatgcgactggcgcggagcccggcctgccggccttgccgatccagtacgccgattacgccctgtggcagcgcagctggctggaggccggtgagcaggagcgccagctggagtactggcgcggcaagctcggcgagcggcatccggtcttggagttgccgaccgaccacccgcgtccggcggttcccagctaccgtggcagccgttacgagttcagcatcgagccggccctggccgaggctctgcgcggcaccgcccgacgccaggggctgaccctgttcatgctgttgctcggcggcttcaatatcctcctgcaacgctatagcgggcagaccgacctgcgggtcggcgtccccatcgccaaccgcaaccgcgccgaggtggaagggctgatcggcctgttcgtcaacacccaggtgctgcgctcggtattcgacggccgcacgtcggtggcgaccctgctggccgggctcaaggacaccgtgcttggcgcccaggcccatcaggatctgccgttcgagcgcctggtcgaggcgttcaaggtcgagcgcagcctgagccacagcccgctgttccaggtgatgtacaaccaccagccgttggtggccgacatcgaggcgctggacagcgtggccggcctgagcttcggccagctcgactggaagagccgtaccacccagttcgacctgagcctggatacctacgagaagggcggccgcctgtacgccgcgctgacctacgcgaccgacctgttcgaggagcggaccgtcgagcgcatggcgcggcattggcagaacctgctgcgcggcatgctggagaacccgcaggccagcgtcgactcgctgccgatgctcgatgccgaggagcgtggccagttgctggaaggctggaacgccactgcggccgagtacccgctgcaacgcggcgtgcaccggttgttcgaggagcaggtcgagcgcacgccgacggcgccggcgctggccttcggcgaggagcgcctggactacgccgagctgaaccgccgggccaaccgcctggcgcatgccctgatcgagcgcggggtcggtgcggaccgcctggtgggcgtggccatggagcgctccatcgagatggtcgtggccctgatggcgatcctcaaggccggcggcgcctacgtgccggtggacccggagtatcccgaggagcgccaggcctacatgctggaggacagcggcgtggagctgctgctcagccagtcgcacctgaagctgccgctggcgcaaggcgtgcagcggatcgacctggaccaggccgatgcctggctggaaaaccatgccgagaacaatccaggggtcgagctgaacggcgagaatcttgcctatgtcatctacacctccggttccaccggcaagcccaagggcgccggcaaccgccattcggcgctgagcaaccgtttgtgctggatgcagcaggcctatgggctgggcgtcggcgacacggtgttgcagaagaccccgttcagcttcgacgtgtcggtctgggagttcttctggccgctgatgagtggggcacgtttggtggtggccgcgccgggtgaccatcgcgacccggcgaagctggtggcgctgatcaaccgcgaaggggtcgacacgctgcacttcgtgccgtcgatgctgcaggccttcctgcaggacgaagacgtcgtctcctgcaccagcctgaaacgcatcgtttgcagcggcgaggcgctgccggcggacgcccagcagcaggtgttcgccaagctgccgcaggccggcctctataacctctatggcccgaccgaggcggccatcgacgtcacccactggacctgcgtggaggagggcaaggacgcggtgccgatcggccggccgatcgccaacctggcctgctacatcctcgatggcaacctggagccggtgccggtgggcgtgctcggcgagctgtacctggccgggcagggcctggcccgtggctaccaccagcgtccggggctgactgccgagcgtttcgtcgccagcccgttcgtggccggggagcggatgtaccgcaccggcgacctggcgcgctaccgcgccgacggggtgatcgagtacgccgggcggatcgaccaccaggtgaagctgcgcggcctgcgcatcgagctgggcgagatcgaggcgcgcctgctggagcatccgtgggtgcgcgaggcggcggtgctggcggtggacggcaggcagttggtcggctacgtggtgctggagagcgagggcggcgactggcgcgaagcgctggccgcgcacctggcgacaagcctgccggaatacatggtgccggcgcagtggctggcgctggagcggatgccgctgagtccgaacggcaagctggatcgcaaggcgctaccggcgcctgaagtaagcgtggcgcaggcaggctacagcgcaccgcgcaacgcagtggagcgaaccctggcggaaatctggcaggacctgctgggcgtcgagcgggtcggcctggacgacaacttcttcagcctcggcggcgactcgatcgtctcgatccaggtagtcagccgtgcgcgccaggccggattgcaactgagcccgcgcgacctgttccagcaccagaacatccgcagcctggccctggcggccaaggcgggtgcggcgacggcggaacagggtccggcaagcggcgaggtggcgctggcgccggtacagcgctggttcttcgagcagtcgattcccaaccgccagcactggaaccagtctctcttgttgcaggcgcgccagccgctcgacggcgaccggctggggcgtgccctggaacgcctgcaggcgcagcacgatgccctgcgcctgcgtttccgcgaagagcgcggcgcctggcaccaggcctacgccgagcaggccggcgagccgctgtggcgccggcaggcggggtccgaggaggtgttgctggcgctttgcgaagaagcccagcgcagcctcgacctcgaacaggggccgctgctgcgtgcgctgctggtggacatggccgacggcagccagcgcctgctgctggtcatccaccacctggcggtggacggggtgtcctggcgcatcctgctggaagacctgcagcgtctctatgccgacctcgacgccgatctcgggccgcgtagcagttcctaccaggcctggagccggcacctgcacgaacaggccggcgcgcgcctggaggaactcgactactggcaggcgcaactgcacgacgctccgcatgcgctgccatgcgaaaacccgcacggcgccctggaaaaccgccatgagcgcaagctcgtcctgaccctggacgccgagcgtacccggcagttgctgcaggaagccccggcggcctaccggacccaggtcaacgacctgctgctgaccgccctggcccgcgcgacctgccgctggagcggcgacgccagcgtgctggtgcagctcgaagggcacggccgcgaggaccttggcgaggccatcgagctgagccgcacggtgggctggttcaccagcctgttcccgctgcgcctgaccccggccgcggacctcggcgagtcgctgaaggcgatcaaggagcaactgcgcggcgtgccggacaagggtgtcggctacggcctgctgcgctacctggctggagaggaggctgcgacccgcctggccgcactgccgcagccgcggatcaccttcaattacctgggccggttcgaccgtcagttcgatggagcggcgctgctggtaccggccacggaaagcgccggcgccgcccaggatccgtgcgccccgctggccaactggttgagcatcgaaggccaggtctacggcggcgagctgagcctgcactggagcttcagccgggaaatgttcgccgaggcgaccgtccagcgcctggtcgatgactacgcgcgggagctgcacgcgctgatcgagcattgtctcgacccgcggcatcggggtgtgacgccgtcggacttcccgctggccgggctttcccagacgcagctcgatgaattgtccttggatcctgattcggtgcgggacatctatccgttgtcgccgatgcagcagggcatgctgtttcacagtcttcatggaacggaaggcgactatgtcaaccagttgcgcatggatatcggcggattggacccggatcgcttccgcgcagcctggcaggccaccctcgatgcccatgagatcctgcgcagcggattcctctggaaggacggctggcctcagccgttgcaggtggtattcgagcaggcgacgctggagctgcggctggccccgccaggcagtgatccgcaacggcaggcagaggctgagcgcgaagccggtttcgacccggccagggcgccgttgcaacgcttggtgttggtgccgctggcgaatgggcggatgcacctcatctatacctatcaccacatcctgatggatggctggagcaacgcccaactgctcgccgaggtactgcagcgctatgcggggcaggaggtagccgctaccgttgggcgttaccgcgactacatcggttggttgcagagccgcgatgcgaaggcgaccgagtctttctggcgcgatcggctggcctccctggagatgccgacacgcctggcgcgccagacgaggacggagcagcctggccagggtgagcatctgcgcgaactggatccgcagacgacccgccaactggcgtccttcgcccaaggtcagaaggtcacgctcaacaccttggtgcaagcggcctgggcgctgctcctgcagcggcactgcgggcaggagacggtagccttcggcgccaccgtggccggacggccggcggaactgccaggcatcgaggcgcagatcggtctgtttatcaataccctgccggtgatcgccgcgccgcagccacagcagagcgtcgcggactacctgcaggggatgcaggcgctcaacctggcgctgcgcgaacacgagcatacgcctctgtacgacatccagcgctgggccgggcatggcggcgaggctctgttcgatagcatcctggtgttcgagaacttccccgtggccgaggctctgcgccaggctcccgccgatctggagttctccacgccaagcaaccacgagcagaccaactaccccctgacgctgggtgtcaccctgggtgagcgcctgagcctgcagtacgtctatgcgcggcgcgatttcgacgcagcggacatcgccgaactggaccgtcatctgctgcatctgctgcagcggatggccgagaccccccaggcagcgctgggcgagctggccctgctcgacgccggggaacgccaggaggcgctgcgggattggcaggcaccgctcgaggcgctgccgcggggcggcgtcgcggcggccttcgcgcatcaggcagcgttggcgcctgaggcgatcgcgctggtatgcggcgacgagtatctcagctatgccgaactggatatgcgcgccgagcgtctggcgcgtggcctgcgggcgcgcggcgtggccgcggaagcgctggtggcgatcgctgccgagcgctccttcgacctggtcgtcggcctgctgggtatcctcaaggccggtgccggctacctgccgctggatccgaactaccccgcggagcgcctggcgtacatgttgcgcgacagcggcgcgcgctggctgatctgccaggaaaccctggcggagcggctgccctgcccggcagaggtcgagcggctgccgctggagaccgccgcctggccggcgagtgcagatacgcggccgctgccggaggtagctggcgagacgctggcctacgtgatctatacgtccggctcgaccggccagcccaaaggagtggcggtcagccaggcggcgctcgtcgcgcactgccaggcggcagcacgcacctacggcgtcggccctggcgactgccaactgcagttcgcctcgatcagtttcgatgccgctgccgaacaactcttcgtacctctgctggcaggagcccgggtcctgctcggcgacgctggacagtggagcgcgcaacatctggcggatgaggtggagcggcacgcggtgactatcctcgatctaccgccggcttatcttcagcaacaggcggaggagttgcgccacgccggccgccggatcgcggtacgcgcctgtatcctcggcggcgaagcctgggacgccagcctgctgacccagcaggcggtgcaggctgaagcctggttcaacgcctacggtcccaccgaggcggtgatcactccgctggcctggcactgtcggacgcaagagggcggcgctcccgctatcggccgcgcgctcggtgcgcgccgggcctgcatactggacgcagccctgcagccatgtgcgccggggatgatcggcgagctgtacatcggcggccagtgcctggctcgtggctacctgggccgccccggccagaccgccgagcgtttcgtggccgatccgttctcaggttcgggcgagcgcctgtatcgcaccggggacctggcgcgttatcgcgtcgacggtcaggtcgaatatctcggccgcgccgatcagcagatcaagatccgtggtttccgcatcgagatcggcgaaatcgagagccaactgcttgcacacccgtatgtggcggaagcagcggtcgtggcgctggatggcgtcggtggtccgctgctggcggcctacctggtggggcgtgacgctatgcggggtgaggaccttctggcggagctgcgcacctggctggccggacgcttgcctgcgtacatgcaaccgacggcttggcaggtgctgtccagcttgccgctgaacgccaacggcaagctggatcgcaaggcgctgccgaaggtggacgcggctgcccgccgccaggccggagagcctccgcgggaggggctcgaacgttcggtcgcagcgatctgggaggcgctgctcggtgtcgagggcatcgcccgcgacgagcacttcttcgaactcggcggtcactccctcagcgccacccgggtggtctcgcgcctgcgccaggatctggagctggacgtacccttgcgcatcctgttcgagcggccggtcctggcagacttcgccgcttccctggagtcccaggcggcgagcgctgcccctgtgctgcaaatattgccgcgagtcgccgagctgcctttgtcgcatgctcagcaacgcatgtggttcctctggaaactggagcctgaaagcgcggcctatcatctccccagcgtactgcacgtgcgtggcgtcctggaccaggcggcgttgcagcaggccttcgattggctggtgctgcgccacgagaccttgcgcacccgcttcgaggaggtcgacggtcaggcgcgccagacgatcctggcgaacatgccgttgcgcattgtcctggaggattgcgccggggcgagcgaagcaacgttgcgccagcgggtggccgaggaaatccgccagccattcgacctggctcgtgggccgctgctgcgcgtgcgtctgctggcgctggctgggcaggagcatgtgttggtcatcacccagcaccatatcgtgtccgacggttggtcgatgcaggtgatggtcgacgaactgctccaggcctatgccgcggcgcgccgcggcgaacaaccgacgctggcgccattgacgctgcagtacgccgactatgctgcctggcatcgcgcctggctggatagcggcgagggcgcgcggcagctggattactggcgtgagcgcctgggcgccgagcagccggtcctggaactgcccgccgaccgggtgcgcccggcccaggccagcggacgcgggcagcgtctggacatggcgctgccggtgtcattatcggaggagctgctggcctgcgcccggcgggagggtgtcaccccgttcatgcttctattggcctcgttccaggtgctgttgaagcgctatagcgggcagtcggacattcgcgtcggggtacctatcgccaaccgcaaccgcgccgaggtcgagcgcctgatcggcttcttcgtcaatacccaggtgctgcgttgccaggtcgatgctggcctggctttccgcgatctactgggccgcgtgcgcgaggcggcgctgggcgcgcaggcgcaccaggatttgccgttcgagcaattggtcgatgccttgcagcccgaacgcaatctcagccacagcccgttgttccaggtgatgtataaccaccagagcggcgagcggcaggatgcccaagtcgatggtttgcacatcgagagttttgcctgggacggtgctgccgcacagttcgaccttgccctcgatacctgggaaaccccggacggccttggggcggcgctgacctacgcgaccgacctgttcgaggcgcggaccgtcgagcgcatggcgcggcattggcagaacctgctgcgcggcatgctggagaacccgcaggccagcgtcgactcgctgccgatgctcgatgccgaggagcgtggccagttgctggaaggctggaacgccactgcggccgagtacccgctgcaacgcggcgtgcaccggttgttcgaggagcaggtcgagcgcacgccgacggcgccggcgctggccttcggcgaggagcgcctggactacgccgagctgaaccgccgggccaaccgcctggcgcatgccctgatcgagcgcggggtcggtgcggaccgcctggtgggcgtggccatggagcgctccatcgagatggtcgtggccctgatggcgatcctcaaggccggcggcgcctacgtgccggtggacccggagtatcccgaggagcgccaggcctacatgctggaggacagcggcgtggagctgctgctcagccagtcgcacctgaagctgccgctggcgcaaggcgtgcagcggatcgacctggaccaggccgatgcctggctggaaaaccatgccgagaacaatccaggggtcgagctgaacggcgagaatcttgcctatgtcatctacacctccggttccaccggcaagcccaagggcgccggcaaccgccattcggcgctgagcaaccgtttgtgctggatgcagcaggcctatgggctgggcgtcggcgacacggtgttgcagaagaccccgttcagcttcgacgtgtcggtctgggagttcttctggccgctgatgagtggggcacgtttggtggtggccgcgccgggtgaccatcgcgacccggcgaagctggtggcgctgatcaaccgcgaaggggtcgacacgctgcacttcgtgccgtcgatgctgcaggccttcctgcaggacgaagacgtcgtctcctgcaccagcctgaaacgcatcgtttgcagcggcgaggcgctgccggcggacgcccagcagcaggtgttcgccaagctgccgcaggccggcctctataacctctatggcccgaccgaggcggccatcgacgtcacccactggacctgcgtggaggagggcaaggacgcggtgccgatcggccggccgatcgccaacctggcctgctacatcctcgatggcaacctggagccggtgccggtgggcgtgctcggcgagctgtacctggccgggcagggcctggcccgtggctaccaccagcgtccggggctgactgccgagcgtttcgtcgccagcccgttcgtggccggggagcggatgtaccgcaccggcgacctggcgcgctaccgcgccgacggggtgatcgagtacgccgggcggatcgaccaccaggtgaagctgcgcggcctgcgcatcgagctgggcgagatcgaggcgcgcctgctggagcatccgtgggtgcgcgaggcggcggtgctggcggtggacggcaagcagttggtcggctacgtggtgctggagagcgagagcggcgactggcgcgaagccctggccgcgcacctggcggcgagcctgccggaatacatggtgccggcgcagtggttggcgctggagcggatgccgttgagtccgaacggcaagctggatcgcaaggcgttgccgcgaccgcaagctgctgcggggcagacgcatgttgcgccgcagaatgaaatggagcgacgtatcgcggccgtctgggcggacgtgctgaagctggaggaggtgggcgccaccgacaacttctttgccctgggtggcgattccatcgtttcgatccaggtggtgagtcgatgccgtgcggcgggcatccagttcactccgaaggacctgttccaacaacagaccgtacaggggctggcgcgagtcgcccgcgtaggggctgcggtgcaaatggagcaggggcctgtgagcggcgagacggtgttgttgccgttccagcggttgttcttcgaacagccgattcccaatcgccagcactggaaccagtcattgctgttgaagccgcgcgaggccctgaatgcgaaggcactcgaagcggccttgcaggccctggtcgaacatcacgacgcattgcgtctgcgcttccatgaaacggacggaacctggcatgccgaacatgccgaagcaacgctgggcggtgcgctgctctggcgtgccgaggcggtggaccgacaagcgctggagtcgctctgcgaggagtcgcagcgcagcctggacctgaccgacggcccactgttgcggagcctgttggtggatatggccgacggcggccagcgtctgttgttggtgatccaccatctggtggtggacggggtgtcctggcgcattctgctggaggatttgcaaagggcttaccagcagagcctccgtggagaagctccgcggctgcctggcaagaccagcccgttcaaggcctgggccggccgagtgagcgagcatgcccgtggtgagtcgatgaaggcgcagttgcagttttggcgcgagctgctggaaggtgcgccggccgagcttccgtgcgagcatccgcaaggcgctctggagcagcgtttcgccacctccgtgcagagtcgcttcgaccgcagcttgaccgaacgcctgctgaagcaggcgccggcagcctaccgtacccaggtcaacgatcttctgctgaccgccctggcgcgagtggtctgccgttggagcggcgcctcttcaagcctggtacagctggaaggacatgggcgcgaggagctgttcgccgatatcgacctgagtcgcaccgtcggttggttcaccagtttgttcccggtgcgcctgagcccggtcgcggatcttggcgagtccctgaaggcgatcaaggaacagttgcgtgcgattcccgacaagggcctgggttatggcttgctgcgctatctggctggagaggaaagtgcccgggtcctggcggggttgccgcaggcgcggatcactttcaattacctgggccagttcgacgctcagttcgacgagatggctctgctggacccggctggcgaaagcgcgggggcagagatggaccccggcgctccgctggacaactggctgagtctcaatggccgggtgttcgacggtgaactgagtatcgactggagcttcagctcgcagatgttcggcgaggaccaggtgcgtcgcctggccgatgactatgtggctgagctgacggcgctggtcgacttctgctgcgattcgccacggcatggcgcgacgccttccgatttcccgctggcggggttggaccaggcgcgtctggatgccctgccggtcgcgctggaagaggtcgaggacatctatccgctgtcacccatgcagcagggcatgctgttccattcgctgtacgagcaggcatcgagcgactacatcaatcagatgcgtgtggatgtgtccggcctcgatatcccgcgcttccgcgcagcctggcagtccgccctggaccggcacgcgatcctgcgcagtggtttcgcctggcagggggagctgcagcagcccttgcagatcgtctatcgacagcgccagttgcccttcgccgaagaggacctgagccaggcggcgaatcgggacgccgcgctgctcgcgctggctgcggccgagcgcgaacgcggtttcgaattgcagcgtgcgccactgttgcggctgctgttggtgaagactgccgaaggtgagcaccacctgatctacacccatcatcacatcctgctggacggatggagcaatgcccagttgctcagcgaggtgctggagtcctatgccggacgctcgccggagcagccccgggatggccgctatagcgactacatcgcctggctgcagcggcaggacgcggcagctaccgaggcattctggcgcgagcagatggcggctctggacgagccgacgcgattggtcgaggcactggctcagccgggactgacatcggccaacggcgtcggagagcacctgcgtgaggtggacgcaacggctaccgcgcggctccgggatttcgcccggcgccaccaggtcactctcaataccctggtccaggcgggctgggcgctgctcctgcaacgctataccggacaacacaccgtggtcttcggcgccaccgtctccgggcgtcctgccgatctgccgggtgtcgagaaccaggtcgggttgttcatcaataccttgccggtggtggtaacgctggctccacagatgaccctcgacgaactgctgcaggggctgcaacggcagaacctggcgttgcgcgaacaggagcacacgcctctgttcgagctgcagcgctgggcggggttcggcggcgaggcggttttcgacaacctgttggtgttcgaaaactacccggtggacgaggtgctcgaacggtcctccgctggaggcgtgcgtttcggtgccgtagcgatgcacgagcagaccaactatccgctggccctggcgctgggtggcggggatagcttgtcactgcaattcagctacgatcgcggactgttcccggccgctacgatcgagcgcctgggtcgccacctgacgactctgctggaggcattcgccgaacatccgcagcgacgtctggtcgatctgcagatgctcgagaaggcggagcttagcgctatcggcgctatctggaaccgcagcgattcgggctatccggcaacgccgctggtacaccagcgagtggccgagcgggcgcgtatggcgccggatgcggtggcggtgatcttcgacgaggaaaagctcacctacgccgagctggatagccgggccaaccgcctggcccatgcgttgatcgcccgaggcgtcggccccgaggtgcgggtggcgatcgccatgcagcgcagcgcggagatcatggtggcgttcctggcggtactgaaggccggcggcgcctacgtgccgctggatatcgaatacccgcgcgagcgcctgctgtacatgatgcaggacagtcgcgcgcacctgctgctgacccatagccacctgctggagcgtctgccgatccccgaggggttgtcctgcctgtccgtggatcgcgaggaggagtgggccggcttccccgcccatgatccagaggtggcgctgcacggcgacaacctggcctatgtgatctacacctccggctccaccggcatgcccaagggcgtggcggtgtcccacggtccgctgatcgcccatatcgtggctaccggcgagcgctacgagatgaccccggaggactgcgagctgcacttcatgtcgttcgccttcgacggttcccacgaaggctggatgcacccgttgatcaacggcgcgcgggtgctgatccgcgacgacagcctgtggctgccggaacgaacctacgccgagatgcatcgccacggggtaacggtgggggtgttcccgccggtgtacctgcagcaactggccgagcatgccgagcgcgacggcaatccgccgccggtacgggtgtattgcttcggcggcgacgcggtggcgcaggccagctatgacctggcgtggcgggcgctgaagccgaagtacctgttcaacggctacggcccgaccgagacggtggtgacgccgctgctgtggaaagcacgggcgggcgatgcctgcggcgcggcctacatgccgatcggtacgctgctgggcaaccgtagcggctacatcctcgacgggcagttgaacctgttgccggtaggcgtggcgggcgaactgtacctgggcggggaaggggtggcgcgtggctacctggagcgtccggcgctgaccgccgagcgtttcgtgccggatccctttggcgcgccgggcagccggctgtaccgcagcggcgacctgacccgtgggcgtgcggatggggtggtggactacctcggacgggtggatcaccaggtgaagatccgaggcttccgcatcgaactgggagagatcgaggcgcgcctgcgcgagcatccggcggtgcgcgaggcggtggtggtggcccagtcgggcgcggtgggccagcagttggtgggctacgtggtggcgcaggagccggcggtcgcggattcgccggaagcgcaggcggagtgccgggcgcagttgaagacggcgctgcgcgagcgcctgccggaatacatggtgccgtcgcacctgttgttcctggcgcggatgccgctgacgccgaacggcaagctggaccgcaagggcctgccacagccggatgcgagcctgttgcagcaggtctacgtggcgccgcgaagcgatctggagcaacaggtcgcggggatctgggcggaggtcctgcaattgcaacaggtcgggctcgacgacaacttcttcgaactcggcggccactcgttgctggcgatccaggtgactgcccggatgcagagcgaggtcggcgtggagctgccgctggcggcgttgttccagaccgagtcgctgcaagcctatgccgagcttgccgcggcgcagacttccagcaatgacaccgatttcgatgaccttcgtgaattcatgagcgaactagaggcgatctgacccatgctttccaatccaaacctggacctcgtgtcccgcttcgttcgcctgcctctggcgcagcagaaattgttctatcagcgtgtccaggccaagggcatgagcttcgcccgcctgccgatcccgcagactcgccaggagatggacaacctgccgctgtcctatgcccaagagcggcagtggttcctctggcagctggagccggagagttccgcctaccacattcctaccgccctgcgcctgcgcggcaggttggacattgcgtccttgcagcgcagcttcgcggcgctcgtcgagcggcacgaaagcctgcgcacgcggatcgcgcggatgggtgatgaatgggtgcaggtcgtctccgccgacgtctcgctggcgctcgaagtcgaagtgcaacggggactcgacgaacagcgattgctggagcgggtcgaggcggagatcgcacgacccttcgatctcgaacagggaccgttactgcgggtgactttgctggaggtggacgccgacgagcatgtgctggtcatggtccagcaccatatcgtctccgacggttggtcgatgcaattgatggtcgaggaactggtccagctctatgccgcctatagccaagggctcgacgtggtgttgccggccctgccgatccagtacgcggactacgccctgtggcagcgcagctggatggaggcgggggaaaaggagcgccagttggcgtactggaccggcctgctgggcggcgagcagccggtgatcgagttgcccctcgatcacccgcggcagccgctgcgcagctatcgtggagcgcaattggacctggagctggagccacacctggcccttgccttgaaacagctggttcagcgcaagggtgtgaccatgttcatgctgttgctggcttccttccaggcgctgttgcatcgctatagcggacaggcggatatccgtgtcggcgtgccgatcgccaaccgtaaccgggttgaaaccgagcggctgatcggtttcttcgtcaacacccaggtgctcaaggccgacatcaatggccggatgggtttcgacgagttgctggcccaggcccgccagcgcgcgctggaggcacaggcgcaccaggacctgccgttcgagcaactggtggaggctttgcagccggaacgcagcctcggccacaacccgttgttccaggtcatgttcaatcaccaggccgactctcgttcggccaaccagggcgtgcaactgccaggcctgtcgctggagcggatggagtggcggagcagctccgtggccttcgacctgacgctggacgtgcacgaggccgaggacggtatctgggcgtcgttcggctatgccacggatctgttcgaggcctcgaccgtcgagcgcctggctcggcactggcagaatctcctgcgcggcatcgtggccgaaccgggccggccggtcgccgagttgccgctgttgctggacgaggagcgcgattgcctgttgcgggcctgggcagagaacgccgacgagggtgggttgccgcccctggtccagttgcagatccaggagcaggcccgtctgcgtccgcaggcgcaagcactggcgctggaggggcaggcgttgagctacgccgagctcaacgcccgcgccaatcgtctggctcactgcctgatagcgcgtggcgtcggtcccgatgtgctggtgggaatcgccgtcgagcgctcgctggacatggtggtcggtctgctggcgatcctcaaggccggtggtgcctatgtgccgctggacccgacctatccgcaggaccgtttgcgtcacatgctcgaggacagcgccgtcggcctgttgctcagccaggagcatttgctgcccgggctgcctttgcacgaagggctggaggtgctctccatcgaccgcctggagcgggacgcatcggtgtctacggatgatccggtggtgaacctgcggccggagaacctggcctatgtgatctacacctccggctccaccggaaaacccaagggcgtggccatcagccatgcggcgcttgcgcagttctcgcgtatcgccagtggttattccgcgctcaccccggaggatcggatattgcagttcgccaccctgagcttcgacggcttcgtcgaacagctctatccggcgctgacccgtggtgcctgcgtggtcctgcgtggcggcgacctctgggataccggtgagctgtatcggcagatagtcgagcagggcgtgacccttgccgacctgcccacggcgtactggaacctgttcctgctcgatgccctggccgagccacggcgttcctacggtgccttgcggcagatccacatcggtggcgaagccatgccactggaggggccgaagctctggcggcaagccggcatgggccgggtgaggttgctcaatacctatggaccgaccgaggccacggtggtgtccagcgtcttcgattgttccgccgagaacgcccgggtgggcaatgccagtcctatcggccaggcgctacccggccgtacgttgctggtgctggatgaacatctcggcctactgcccgtaggggcggtaggcgagctttatattgccagccgtgccgggctggcccgtgcctaccacgatcggcccggcttgaccgccgagcgcttcttgcccgaccccttcggcgaaccgggctcgaggctctaccggaccggcgacctggcgcgccgacgcggtgacggcgtgatcgagtacatggggcgtgccgaccatcaggtgaagatccgcggcttccgcatcgagctgggggaggtcgaagcccgcctcctggacttggagggaatacgcgaagcggcggctcttgcgctggacggtcaactggtggcctacctggtggctgaggggggcgaggacgaaactcgccagccggctttgcgcgagcgtatccgcacagcgctacgggcctcgctaccggactacatggtgccctcgcacctgctgttcctcgagcggatgccgctcagtccaaatggcaagctggaccgtcgggcgctgccgaagccggatgccggcctgatgcaacacgaacacatggcgccggcgagcgcgctggagaaagacgtggccgcgatatggggcgagttgctgggcgtcgaacgggtcggccttaccgacaacttcttcgaattgggcggacactcgctgctggcgacgcgcctggtctcgcggattcgccaggatctcggtatcgaagtcagcctgaagagccttttcgagcagccggtcctgcagggattcgtcgagagcctgggcgagaaaccggcggaggttccgccgatcatgcccgttacccgcgagcagccgctgccgttgtcctatgcacaggagcgccagtggttcctctggcaattggaaccggagagcgcggcctatcacattcccgccgccctgcgcttgcgcggcggcctcgatgtcgtcgcgctacagcgcagtttcgagcgcctcgcacagcgtcacgagtcgttgcgtacccgcttccgccaggaaggcctgcgtaccgttcaggtggtggacgccgatgggcagttgcaggtttcccggcataacctggcgaatgtcgatgacgcgtcgctcagggcggcagtcgaagcggagatggccaggcccttcgacctacggacggatgcgttgctgcggatcagtctgttcgaagtggctccgaatgaccatgtgctggtcatggtccagcaccatatcgtctccgacggttggtcgatgcagttgatggtcgaagagctggtccagctctatgccgcctacagccaggggcgcgaagcggccctgccggcgctgccgatacagtatccggactatgcagtctggcagcgcgaatggatggaggccggagagagggagcgccagttggcgtactggatcggcctgctgggtggcgaacagccggtgctggagctgccgttcgatcgtccccgtcctgcggagcagagctttcgcggcgcgcggctggagttcgaactcggcgcggagcgggccaggcggctgaaggcgcttgcccaacggcagggtgcgagtaccttcatgttgctgctggcgtcgttccaggcgctgctgtatcgctacagcggtcagccggatatccgtgtcggcgtgccggtcgccaatcgcaaccgggtcgaaaccgagcgactgatcgggttcttcgtcaacacccaggtgctcaaggccgacatcgatgggcagatggggttcgaccgattgctgcaccaggttcgccaacgctcgctggaggcgcaggcgcaccaggacttgccgttcgagcaactggtggaagccttgcaaccggagcgcagtctcagccacagcccgctgttccaggtgctattcaactaccaggcggagcggggcgagcacggcttgccggaagtcgcgggactgagcatcgaagagcaggcgtgggaaagccatacggcgcagttcgacctggtgctggatacctgtgagtccgagtcggacatctgggcggcgctggtctatgcgaccgatctattcgatgcttcgacctcagagcgcctggtacggcattggcagaacctgctggatgcgatcctggcgatgcctgacgctcgcctgggagagctggacatgctcgaccgcgaggagtgcgaagtcatcgggcagctctggaaccgcagcgactcgggctatccggcaacgccgctggtacaccagcgagtggccgagcgggcgcgtatggcgccggatgcggtggcggtgatcttcgacgaggaaaagctcacctacgccgagctggatagccgggccaaccgcctggcccatgcgttgatcgcccgaggcgttggccccgaggtgcgggtggcgatcgccatgcagcgcagtgcggagatcatggtggcgttcctggcggtactgaaggccggcggcgcctacgtgccgctggacatcgaatacccgcgcgagcgcctgctgtacatgatgcaggacagtcgcgcgcacctgctgctgacccatagccacctgctggagcgtctgccgatccccgaggggttgtcctgcctgtccgtggatcgcgaggaggagtgggccggcttccccgctcatgatccagaggtggcgctgcacggcgacaacctggcctatgtgatctacacctccggctccaccggcatgcccaagggcgtggcggtgtcccacggtccgttgatcgcccatatcgtggccaccggcgagcgctacgagatgaccccggaggactgcgagctgcacttcatgtcgttcgccttcgacggttcccacgaaggctggatgcacccgttgatcaacggcgcgcgggtgctgatccgcgacgacagcctgtggctgccggaacggacctacgccgagatgcatcgccacggggtaacggtgggggtgttcccgccggtgtacctgcagcaactggccgagcatgccgagcgcgacggcaatccgccgccggtacgggtctattgcttcggcggcgacgcggtggcgcaggccagctatgacctggcgtggcgggcgctgaagccgaagtacctgttcaacggctacggcccgaccgagacggtggtgacgccgctgctgtggaaagcacgggcgggcgatgcctgcggcgcggcctacatgccgatcggtacgctgctgggcaaccgtagcggctacatcctcgacgggcagttgaacctgctgccggtaggcgtggcgggcgaactgtacctgggcggggaaggggtggcgcgcggctacctggagcgtccggcgctgaccgccgagcgtttcgtgccggatccctttggcgcgccgggcagccggctgtaccgcagcggcgacctgacccgtgggcgtgcggatggggtggtggactacctcggacgggtggatcaccaggtgaagatccgaggcttccgcatcgaactgggagagatcgaggcgcgcctgcgcgagcatccggcggtgcgcgaggcggtggtggtggcccagccgggcgcggtgggccagcagttggtgggctacgtggtggcgcaggcgccggcggtcgcggattcgccggaagcgcaggcggagtgccgggcgcagttgaagacggcgctgcgcgagcgcctgccggaatacatggtgccatcgcacctgttgttcctggcgcggatgccgctgacgccgaacggcaagctggaccgcaagggcctgccgcagccggatgcgagcctgttgcagcaggtctacgtggcgccgcgaagcgatctggagcaacaggtcgcggggatctgggcggaggtcctgcaattgcaacaggtcgggctcgacgacaatttcttcgaactcggcggccactcgttgctggccacccaggtcattggccgcctacgcgaacgactgcacctggaggtgccgatcaagtcgatgttcaccgcggagacactgggtgagttctgccacggcgtcgagaccctcaaggccgagagcgcgccggtggaagatgccctggctaaatccctggaggcgctcaaacgtctatctgccgatgaacttgaaaaactgatttcctaagaggcggtagcgtgcaagcactcatagagaaggtgggctccctttccccccaggaaaggaaggcattggctgtcctgctcaagcagcaaggtgtcaatctcttcgagatcgcgccagtgttcaagcgccaggacggcgagcccctgcggctctcctatgcccaggagcgacagtggtttctctggcaactggagccggaaagcgcggcctaccatatcccgagtgtcttgcgtctacgtgggcggctggacctggatgccctgcaacgcagcttcgacagcctggttgcgcggcacgagaccctacgcacccgttttcgcctcgacggcgacgaggcgcgccaggagatcgccgcatccatggcattgccgttggatatcgtcgcgttggggccgctcgaggagggcgccctcgctcggcaggtcgagacgacgatcgcgcggccgttcgacctggagcgtgggccgctgctgcgggtgagcctgttgcggctggccgaggacgaccatgtgctggtgctggtccagcatcacatcgtgtccgacggttggtcgatgcaggtgatggtcgaggaactggtccagctctatgccgcctatagtcgagggctcgaggtagcgctgccggctttgccgatccagtacgcggactacgccctgtggcagcgcagctggatggaggccggggaaaaggagcgccagttggcgtactggaccggcctgctgggcggcgagcagccggtgctggagttgccgttcgaccggccgcgcccggttcggcaaagccatcgtggtgcccagttcatcctggaactggatattgatctgtcccaggcgctcaggcgcgtggcccagcaggagggggctactgccttcgccctgttgctggcttcgttccaggcgctgctgtatcgctacagcgggcaggcggatatccgtgtcggcgtgccgatcgccaatcgcaaccgcgtggagaccgagcggctgatcggcttcttcgtcaacacccaggtgctcaaggccgacctggacggtcggatgggcttcgacgagctgctggcacaggcccgccaacgcgcgctggaggcccaggcgcaccaggacctgccgttcgagcaactggtggaggccttgcagccggagcgcagtcttagccacaacccgctgttccaggtgctgttcaactaccagagcgaagcccgtggcaacggccaggcattccgcttcgacgagttacagatggaaagcgtgcagttcgacagccggacggcgcagttcgacttgacgttggacctgacggacgaagagcagcgtttttgcgccgttttcgactacgccaccgatctgttcgatgcctccaccgtggaacgcctggccggccattggcgcaacctgttgcgcggcatcgtcgccaacccacgacagcggctcggcgagttgccgctgctggatgccccggagcgccggcagaccctctccgaatggaacccggcccagcgcgagtgcgcggtgcagggcaccttgcagcagcgtttcgaggagcaggcgcggcaacggccacaggcggttgcgctgatcctcgacgaacaacggttgagctacggcgaactgaatgcgcgggccaatcgcctggcgcactgcctgatcgcccgtggcgttggcgcggacgtgccggtcgggctggcgctggagcgttcgctggacatgctggtcggcttgctggcgatcctcaaggccggcggcgcctacctgccgttggacccggcggcgccagaggagcgcctggcgcatatcctcgacgacagtggggtacggctgctgctgacccagaggcatctgctcgagcacctgccacggcaggcgggggtggaggtgctggccatcgacggactggtgctggacggctacgccgagagcgacccgttaacgacgctatcggcggacaacctggcctacgtgatctatacctcgggctcgaccggcaagcccaagggcacgttgctcacccaccgcaacgcgctgcgcctgttcagcgccaccgaggcctggttcggcttcgacgagcgggacgtgtggacgttgttccattcctacgccttcgatttctcggtctgggaaatcttcggcgcgctgctctatggcgggcgcctggtgatcgtgccgcaatgggtgagccgttcgccggaagacttctaccgtctgctgtgccgcgaaggcgtgacggtgctcaaccagacgccgtcggcgttcaagcaactgatggcgatggcctgttccgccgacatggcgacgcagcagccggcgctgcgctacgtgatcttcggtggcgaggcgctggatctgcagagcctgcggccgtggttccagcgcttcggcgatcgccagccgcaactggtgaacatgtacggcatcaccgagaccacggtgcacgtaacctaccgtccggtgagcgaagccgacctggagggtggcctggtcagtccgattggcgggaccatcccggacctgtcctggtacatcctcgaccgtgacctgaacccggtgccgcgcggcgcggtgggcgagctgtacatcggtcgcgccgggctggcgcgcggctacctgaggcggcccgggttgagtgccacccgcttcgtgccgaacccgttccccggcggcgccggcgagcggctgtaccgtaccggcgacctggcgcggttccaggcggatggcaatatcgagtacatcgggcgtatcgaccaccaggtgaaggttcgcggcttccgtatcgaactgggtgagatcgaagcggcgctcgccggtctggccggggtacgtgatgccgtggtgctggcccatgacggggtcggcggcacgcaactggtgggatacgtggtggcggactcggcggaggatgccgagcgtctgcgggagtcgctgcgggagtcgctgaagcggcacctgccggactacatggtgccggcgcacctgatgctgctggagcggatgccgctgacggtcaatggcaagctcgaccggcaggcgttgccgcaaccggatgcgagcctgtcgcaacaggcctatcgagcgcccggtagcgagctggagcagcgcatcgcagcgatctgggcggagatcctgggagtggaacgggttggcctggacgacaacttcttcgaactgggcggtcattcgttgctggctacccgggtgatttctcgggttcgccaggagcagcagttggacgcaagcctgaaggcgttgttcgagcggccggttctgaaagcgttcgcccagggattggaacgcacgacggatgcggtctcgacgataccgcttgccgatcggcagcaaccgttggcactgtccttcgctcaggagcgtcagtggttcctctggcaactggagccggaaagcgcggcctaccatattccgagtgccttgcgcctacgcgggcggctggacgtggatgccttgcaacgcagcttcgacagcctggtcgcgcggcatgaaaccttgcgtacccgcttccggctggagggagggcgttcgtaccagcaggtacaacctgcggttagcgtttccatcgagcgggaacagttcggtgaagaaggcctgatcgaacggatacaggccatcgttgtgcagccattcgacctggaacgggggccgctgctgcgggtgaacctgttgcaactggccgaagacgaccatgtactggtgctggtccagcaccacatcgtgtccgacggttggtcgatgcaggtgatggtcgaggaactggtccagctctatgccgcctatagccaagggctcgacgtggtgttgccagccctgccgatccagtacgcggactacgccctgtggcagcgcagctggatggaggcgggggaaaaggagcgccagttggcgtactggaccggcctgctgggcggcgagcagccggtgctggagttgccgttcgatcggccgcgtccggcccggcagagccatcgtggcgcgcagttgggtttcgagctaccacgggaactggtcgaggccgtgagagccttggcccagcgtgaaggcgccagtagtttcatgctgttgctggcctcgttccaggcgctgttgtatcgctacagcgggcaggcggatatccgtgtcggtgtgccgatcgccaatcgcaaccgcgtggagaccgagcggctgatcggcttcttcgtcaacacccaggtgctcaaggccgacctggacggtcggatgggcttcgacgagctgctggcccaggcccgccaacgcgcgctggaggcccaggcgcaccaggacctgccgttcgagcaactggtggaagccttgcagccggagcgcaatgccagccacaacccactgttccaggtgctgttcaaccatcagagcgagatacgctcggtgacgcccgaggttcagttggaggacctgcgtctggaaggcctggcctgggacggccagactgcgcagttcgacctgacgctggatattcaggaagacgaaaacggcatctgggcctccttcgactatgccaccgatctgttcgacgcctccaccgtggaacgcctggccggccattggcgcaacctgttgcgcggcatcgtcgccaacccacgacagcggctcggcgagttgccgctgctggatgcgccggagcgccggcagaccctctccgaatggaacccggcccagcgcgagtgcgcggtgcagggcaccttgcagcagcgtttcgaggagcaggcgcggcaacggccacaggcggttgcgctgatcctcgacgaacaacggttgagctacggcgaactgaatgcgcgggccaatcgcctggcgcactgcctgatcgcccgtggcgttggcgcggacgtgccggtcgggctggcgctggagcgttcgctggacatgctggtcggcttgctggcgatcctcaaggccggcggcgcctacctgccgttggacccggcggcgccagaggagcgcctggcgcatatcctcgacgacagtggggtacggctgctgctgacccaggggcatctgctcgagcacctgccacggcaggcgggggtggaggtgctggccatcgacggactggtgctggacggctacgccgagagcgatccgctcccgacgctatcggcggacaacctggcctacgtgatctatacctcgggctcgaccggcaagcccaagggcacattgctcacccaccgcaacgcgctgcgcctgttcagcgccaccgaggcctggttcggcttcgacgagcgggacgtgtggacgttgttccattcctacgccttcgatttctcggtctgggaaatcttcggcgcgctgctctatggcgggcgcctggtgatcgtgccgcaatgggtgagccgttcgccggaagacttctaccgtctgctgtgccgcgaaggcgtgacggtgctcaaccagacgccgtcggcgttcaagcaactgatggcgatggcctgttccgccgacatggcgacgcagcagccggcgctgcgctacgtgatcttcggtggcgaggcgctggatctgcagagcctgcggccgtggttccagcgctttggcgatcgccagccgcaactggtgaacatgtacggcatcaccgagaccacggtgcacgtaacctaccgtccggtgagcgaagccgacctggagggtggcctggtcagtccgatcggcgggaccatcccggacctgtcctggtacatcctcgaccgtgacctgaacccggtgccgcgcggcgcggtgggcgagctgtacatcggtcgcgccgggctggcgcgcggctacctgaggcggcccgggttgagtgccacccgcttcgtgccgaacccgttccccggcggcgccggcgagcggctgtaccgtaccggcgacctggcacggttccaggcggatggcaatatcgagtacatcgggcgtatcgaccaccaggtgaaggttcgcggcttccgtatcgaactgggcgagatcgaagcggcgctcgccggtctggccggggtacgcgatgccgtggtgctggcccatgacggagtcggcggcacgcaactggtgggatacgtggtggcggactcggcggaggatgccgagcgtctgcgggagtcgctgcgggagtcgctgaagcggcacctgccggactacatggtgccggcgcacctgatgctgctggagcggatgccgctgacggtcaatggcaagctcgaccggcaggcgttgccgcaaccggatgcgagcctgtcgcagcaggcctatcgagcgcccggtagcgagctggagcagcgcatcgcagcgatctgggcggagatcctgggagtggaacgggtcggcctggacgacaacttcttcgaactgggcggtcactcattgttgctgctgatgctcaaggagcggatcggcgatacctgccaggctacgctgagcatcagccaactgatgacccatgccagcgtcgcggaacaggcggcatgcatcgaggggcaggcgcgtgagtcgttgctggtgccgctcaacggcaggcgcgaaggttcgccgctgttcatgttccatccgagtttcggctccgtgcactgttacaagaccctcgccatggcgctgcgggatcgtcatccggtcaagggtgttgtctgccgtgccctgctgggcgctggtcgcgaggtgccggagtgggacgatatggttgcggaatacgccgagcaattgctgcaggagcaccccgaaggggctttcaacctggcgggatggtcgctcggcggcaacctggcgatggatgtcgcggcccggctggagcagcgtgggcgacaggtggctttcgtcggttggatcgatgcgccggcaccggtcagggtcgaagcgttctggaacgagatcgggccgacgccagaggcagtcccgaacctatccgtgggcgagatgcgggtggaactgctcggtgtcatgtttccggagcgggccgagcatatcgaacgggcctggtcatcgatctgctccgccacgacggacgatgagcagcgctggacgaggatgagcgaatgggcggaagcggagatcggcgccgagttcgcgacactgcgcagcgaaatcgcacagagcaacgaactggaagtgtcctgggagttgaaacagatcctcgacgagcgcctgaaagcgatggattacccgcgtctgacggcgaaggtcagcctctggtgggccgcgcgcagcaccaatgccatccagcggagcgcggtggagcgctcgatggccgaggcgatcggggcggagcgtgtcgaaccggtgcgggtgctggatacccggcacgacaagatcatcgaccaccctgagtttgtgcagagcttccgggccgccctggagcgtgccgggcgctgatctcaggtccgttccgttcaaagcccgccttcaggcgggctctttgtttctgtacaggaatcatttggtgtcgtgccgacaggcgtcttcggcgatgggtcgcgtggggtaaccgagaagcagaacgccccgcattgcggggcgttctttttcgcagccgggctcagaagtcccagcgagtgctgaacatcaggttccgtggatcgccataggatgccgaggtgtagaaaccgatgttggtgtagtaggtcttgtcgaagacgttgttgacgttgacgctggccgacagcttgtcggtgatctggtagcgggccatcaggtccaccagccagtagtcttcctgggagaacttttcccagcggctgcggggattgttgtagaccatctgccagctcttgccctgccagcgggcgccgccgccgaccgtgagcttgtccagggcgcccttgaacttgtagctggtgtagaggctcaactggtcctgaggctcccaggtggaaaccttcttgccactgtcgtcgcgaatgatcttgtgggtatagccagcctgaacctgccagcctggcgccagttcacccgagatttccgcctcgtagcccttggtcttggccttgatgcccttgtaggcgtaggtgatggcggggttggtcggtttgctgttgtagagggcgtcttcctccgcgcggttttcctcatgaatctcgaagtaggcgagactggtattgagtcgtccgtcgagatattcacccttgatgccgatctcgtagttctggccttcgtcgggttcgagcagcttgttgctgctgtcgcgataccaactgtcctgcggcatgaagatgtcggtatagctggcgtagacggagtaggtatcgttcaggtcgtagaccgcgccgacgtagggaatgaagcgtccggactcgcgaatggtcggattcaggccggttacccggtagtcgaccacgcgtccacctaggaacaggttcaggtcatcggtcacattgaagcgggcggtcatgtagctgcccaactggcgggtcttgtcatcgatgtactgggagggggtaccccagtcgggcttgcctatatcgccgtcccagttgatgaagtcgtcggtggtgttgtcgtagttgcgcaggttccagtagctcttgccctcccagtgggagaaggaagccgaggtgccgaccaccagctcgtgctcgcgaccgaggaactggaaggggccggtgagatagatatccagcgagttgctcttggtttcgccggtgtacttctgcgcaacgatcttggcgctgttgtccggtgccggccagtcgcccatgatcgcgccgaggggcgcgtggtagccgttgatcttgtgatcgagttgcaccttgccgacccagccgttggcgaaattgtgctcgaggttggcgaagacggtgcgggtgtactgctcccaactgctccacttggctccgttgttgaaggagcgggagacgtcgttgcggttgccctggctgtcgaagagcgggaagctgcccgaccagcccgatcccttgggatcgttgtcctgatagtcggcgccgacggtaagcatggtgtcgggattcagatcgaactcgaggatgccgtaatagacgctggttttgcgctcgtagtgatccatgaacgagtgcttatcctggtaggcggctaccgcccggccgcggacgttgccggactcggtcagcgggccgctgacgtccagttcggagcggtaattgtcccaactgcccgcgcccagttcgacatggcccttgaattcatgggtaggtttcttgcggatcaggttgatcgtggcgccgagggaccccgcaccggtgagcaggccggtcgcccccttgagtacttccacccggtcgtagatggccatgtcactgagcgtattgcccgcggagtagccgacgttgcgggccgtcgagggaatcccgtcgtactggaagttgttgatcgagaagccgcgggcatagtagttgttgcggtcagtgtcgtaggccgagacggtgatgcccggcgtatggcgcatgacgtcgtcgatgttgttgaggccgaagtcgtccatgttctggcgggtgaccacggtgatcgactggggcgtctcgcgcggagtcaggaccaggcgggtcgccgtggcgatagtgcctggcgtataggagccgctgtcctcggtgatggtgcccaactggttggaggtgatcatggtggcgccgagatcgacgctgctgtccgccgcctcggcgacgctgatggttatcgcattgccctggaagtccaccgatgcgccggtgccacgaagcagctcggtaatcgcctggttcggctccagcttgcccttgatcgcactgctacgcttgttccggacctcttccgggcgatacagcacctggatatccgcctggcggccgaactcctggagtgcgctgcccagcgcctggggagggatgtcgaactcgatttcctgcgcctggacatatcccgccagcggcaggctcagggccatggcgagcgagtggggaagcatcctgcgttggaaggcacggcgcatcaaaaacgccttactcagaggactgagaccgtgtggtgctggcatgggtgattgctcttcttaggttggcaagttgcgaataaatgagatcgcttctcaattctcttagtatgacgttttacccacggaaaaccggatgaaaaagtttcacgccgtctcggtttccttgacgaccttgcctgccgagagccttatcaactggtccgccatttcgaaatagcgatcatcgtggctgatcacgatgatggtcttgccctggcgcttcaggtccggcaacagttcggtgtagaagaccctgcggaaagccgggtcctggtctgcggcccattcgtcgaagaccaggaccggccgctcttcgagccaggcattgatcagcgcaaggcgcttgcgctgcccggtggagagatcggtggtgctgaagttgccgtccatgacgctgaccttgtgggcgatttccaggcgttgcagatattgggtcgcgttctgcaacgaagcctgcttgccctggaccaggtcgtcgaataggtagtaatcggcgaagatggtgctgaagagctggcggtaatcgtcgcgggtctccgcgctgaccggttctccgttgagaaggatctcgccggactgcgggcgatagaggccgagcagcagcttgatcagggtcgtcttgccgcagccgttctcgccgacgatgaagacgatgtcaccttgggcgatacgcagattgatagggcccagatggaacggttcgctgccttcgacggcgggggggctgtagcgaacgtcgcgcagttccaggctgtcgacggtcttgtccggggcctcctgttcgctgagcagaagatggggttcgggagaggaaaaacgctcggaaagttcggcgacccgctggaaggcgacctgggcgcgactgacgatgggaaggatggtcaccacctgttcgagtggtcccttcatgtacagcaggaccatcacgaagccagtgatggcggccggattggacgaaggccagtaggcctggagcgtaagcgccagaccgatcaccacgaagaacagcatcgagccgaaggtcttggccaggatgaatatattgatggagctgatgtggaggtcgcggatgttgttcgcggtttcgctgatgcggccggtgtgcatgcgatagcgacgggggcggtggatgcgcagttccttcgcgcccgaagcgatggcggtgtagtgcttctgcaattcgtcttcgagatcgcgggcggcatagaaccctttgaaaccgcgggagcgcgccaggtactgggctgccgtgccgatgacgatggcgacgactgtcagcaggaacatcgggaccgataggtaggcgaggtaacccaggcagccgaaagtgatggtcagggcgatggccagtggggtgaaggaaaaggagaagtcgctgatggtatcaatgtcgtgtgtcagtaccggaatgagacggtgggtccggtagcgctcgatctgctcgatgggcgccgagaggactttctcgccgagttccttgcgcagcttcgcgatgatgtgttggccgacgtagctggtaccgatgtcggagacgatcgaactgaccaatgccagcaggcagagtccgccgaacgacagcagtacgccttggccgaggccgttttccgagtgcaaggcgttgttgatgctggccagcagcagggtgatggcaaggccgccggccatgcccagtgctatggagacggccacgatcgctcgaaagggcctgagcagggcgagcagttcgcgaatggcgccgcgcttgggattggtcatagttgcttcccggatgtactaggtcggtggggtcccaggatcgttccatggccgctcccggctgggccggtaggcatgggacggttgagtggggtggcctggcgcaggctttcgttgcggcactgcgaatgcggacggcgaccggctccaggagcatgcgtcacccgtctcggcctccttgcagacagacgaagcaggatgcccggtatttagcggcgttcggcggggcgtaggttcttccacgtaaattgcaggcgatgccgttcgttgcagatcaggaagaggtgtcgcgcccgcccgtcgcaggtcgacgcgcgcttcgactcgacatggcgctgccttcctctggcgctcgatccactcctgggaatgatgaaatgacgaaaaggaaactggcctatatctggtccctgagaaacgccgcggccgacaaggccggccagtacgtgccgtacaagggcgaacagcggtacatgaagtcggtactggagtccttggtggaggcgctgaaccagactgcgctgggcgatgcctacgagctcgtgggcgtgatctacgacgacgacgcggagctgcctcgcgaccagggaaaaatcaaggactacggtttcgcctatcgtcccgggcagcaatggttctatccggcagacctgcaggtgcaaggcaagaccctgaacgacctcttgctcagcgtgccgtccacctaccgtcggtacccgcggggtacccccgagcatgtggccggcaagagcgatttcgagcgacgcctgcatgacaccctggtggagctgggcgccgatgtagtggtattggacgggctcctggtcatcctcgatgagctggtacgcccgggtgctccgttcgcacggcggatcatgaatatccatcctggcgtgacgcgcgaggactcgccttacgagcgtcgtggcgcctatgcgaccctggacgcgttgtatggagcgcggggcgagaaggtggtggattgggcgaccatggagaaggtcgcggtcgagccgctgtactggaccggagcatcgttccactatgtggacaatggcatcgattccggcgaagtgttccatgatgtgctgaaaacggagatttcacccgacgacaccatcctcgagctgcgctggaacaacttcaacaacagcctgttcccggccttgcacgaagggttggcgctgctcgccgagaagctctgaacccggttccttcgaggggttcgaaaaggccggagcggtgtcgtcgctccggccttcttcattctgagtcagagttcgcgcgccacgcggaagccgatccagtcgccgcggtcgctgggggccgcattgttgcggttgcccgagcgcgagaagatcggcggctcgccccagtcgttgccgcggatctgcaccagctcgcacttgtcctccatccacgcgctgccgtcgctcggcgcgccgttgtagtggtcgtgccagcagtcggcgacccactcgtagacgttgccgtgcatgtcgtagacgccgaaggcgttgggcgggaagctgcccaccggcgaggtgaagttgtagccatcgctggcgccgtaggtgttggcgtgcttggcgatgctgtattccttgccttcgtcgaacgggaaggggaacgggccggcgctgccggcgcgggcgccgtactcgcgctcggcctcgctgagcatgcggtagtgcttgccggtcttcttcgacagccaggcggcgtagttcttcacgtcgttgtagtcgacgcacaccgccggctggcgagggccttgctggtagcgcggcttgccggcgatgcattcgcggccggggcgggtatcgccgtcggccagcttgacgccggtggccttcaggtaggcgtccagttcgccggcggtgacctggtagcggctgatggcgaacggcttggcgaaggtcacgtcgtgcagcgggccctcgtcgggctggcggccgacctcgtcgtccggggtgcccatggtgaagctgccggcgggcagtacgaccatctccgggcagtccttgcaatccttgaacaccgtgccgggtttcttcgcttcgtcggcgaaggcgggggcggtggcgacgatcagtgcggccagggccaggggcgataatgcgtgcatggcggttctcgttgagtggcgaaaggggtcaggcgagttgcggggcgaggatttccagcacccggtcgatctccgcctcgtcgttcagcaggctcggcgccaggcgcaccaccgggccgacatcgcgatccacggcgtcgctgattacccggtgcgccatcaggtgtttggcgaccgcctcgcaatcgcggccttcgacgcggaagaaggtgaagcccgaagacagctcggggctggtcggcgtgaccaggcggaccttgggatgctcgcccaggcgctgcttgaggtaggcgttgagctggtggatacgcgcctggacctcggccttgcccaactgcaggtgcagttcgaaggccgtgcccagggccaggcgatgttcgaaggcgtggtagccgccaggggtcatcagggtgccgaagttgtcggcgcgggagaaggtcgggatgctcggcaccaggtgctcctggagctgttccgagcgggcgatgatgaccccggtgccacgcgggccgaacagccacttgtgggtgccggcgatgaagtagtcgcagtcgaagtcggcgaagctgacgtcttccacgccgaaaccatgcacgccgtcgaccacgtagatgatccggtcctgctcgtcgcgcttctggttgagttcgcgcaccagcttgccgatctcgcggatcggcagcttcacgccgctgcccgactgcacccaggtcatgcccagcacccgggtctgcgggcggatctgagcggcgatgctggacaggatctcgtcggcggaaacccgatgcgggtccttgaacagcgggaactcgcggacctgggtacccatgcgcttgtgccggtattccagggtggtgtaggtggagtagtgctcgtgggaggaggtcaggatctccttgcccggctgcaccagcaggccgccgtagatcgccgccaggccgtcggtggtgctgccggtgagcgccacctggccaggttgcacggcgaagtagcgacctgcccaggcgcgagcctcgtcctcgtatttccagatttcctcgcgatgccagtccaccgcttcgcccgggttgcggtcgaagcggacccgcaggcgctcgatggcctcccgcaccggccgagggtgggaggtgaggaggaagttggcgaagtgcagatactgcgggtcgagatcgaattgctggcgcagcgctttccatttattgccggcgtcgctcggtgcgccttcggcgcggagcgactgggcagcggaaagcagcggcaggccggcggcgagaatgccggcctgcttgagaaaggtacgacggtcgttcatcgggaggtccgttgcggcgtggtcagggggtggctgtcggcttggcgcgtttttgcacttcgccccaggcgcgcaggaagttgcctccccagagcttggcgatgtcggcatcggaataaccgcgggtgatcagttcggcagtgacgttgcggatttcgctgacatccttccagccgtccacgccgccaccgtcgttgaagtccgagctgatgcccacgtggtcgatgccgaccttcttcaccgtgtagtcgatggcgtccaccagttccttgaggccggccttgggctcctcctccaggatgccgtagagggcgctggcgtattcaccgaagcgttgttccggccagatggtgatgatcggatcgcccggcatcagcgcatagtccaggccttccaggggtggcaggtcgaagcgcgcgcgcagggcgttgagcttgtccagggtcggtttgctcagcggacgcaggtaggcggggaagccgaccacctggatcacgccgccgctgtccttgatcagttgcatctcgtggtcgctgaggttgcgcttgatgtccaccagggcacgcggcgcggagtgcgaggcgacgatgggcgcgcggctgagggcggcgacctgttccagggccttggtcgacatctgcgagacgtcgatgatcaccccgagatcgttgagccgttcgaccgcctgcttgcctagcggggagaggccgcccagggcatccgccgtgtcgttgaagaacggcaagggacgggaagagtcggaccagtcgttgttgccgacataattgaagccgaacatgcgcacgccgcgggcggcccatttgtccagctgggacaggtcgtcgcccagcgggtaggcgttgagcatgctcatgacgatggcgaacttgccttccatggccaggcggcggaagtcctcgggggagtaggcgatgccgacctggttggggaagtcgcggaccatgccggtgagaatcttgtaacgaatttcctgctggtgacgagcctcgtcgacgaatcccggggtcggcttgtgtggcgcgttcgggccgttccacatctccggccagccgaagatcgccagggcagcgccggacaggcgcccgcggcccgccttgaccaggtcgagctggttcggtccgtccttgtcgaactcgttgccttcggtgccgaagtccggcgggatggtgatccggctatcgaaggagaggatgcgctcatgcaactcctcggcgtgcttcatgaccttgcgcgggtagcccgcttcgctcgggccgaaggtcttccaggccagcaggccgccgccgacgaggatgaggaagatcggcaagccgaggtagagggccttgcgtgtgcgtgttctagtcattgccgtcccagtcaggttcgagatcgaaagcgcggatgagcgtctgccgaagcggactcacctgtcagggtgggacgaggccggagcgggaaaatttagcgccgcgggagggattgtcgagttgcctgtggaacggcatgtgggcggtaaatttgccgacggaaggaacgttctagctggataaagcgagcttcacggttgatacaggtaggacgatgacggtttctcgacgcggattcatggcgggcctggcccttaccggggcggcggcgctgccggtggcttactacacacatcgtcatctgacccgcgaagaggagccgcagacgcctgacgaggcttcgctcgacctggcggctaccgatggcatacgactgggcgaccgcctgcgcggtctatgggatctgcgcctggtaggcggtgatgccgaactgcccgggctgcctcgggagggcttgcaactggtgctggacgtggcacccaagggacgcggcctgattggctacctggatactcctgaacgtctcctcgcggcggagccgccgcgctttcgtgtgcttggcgacttgctcggagccagttctgcaagcatccgctggcgtttggtggaccaggcgagcggttccgtggcaccgactcacgattgctcggcggtgttcgacgaggtctgggcagactatgcgaacgcgggcgacggaactctgagcggacgcatacagcgcctggagcgttcgccgctgtcgccgaacgaggattttcgcttcgttgcggtaaagcgtcacttccccctggcccatgagcgcatcgtgctcaacgagaaacttctcggttggctggtgtcgccgcagcaccgactgttccaccagctatggcacgcttcgcgggacaaatggcatcggctttcggaaaaacaacgcaatgcgttgcgcggagtcggttggcagcccggcccgctggaccgcgaacgcgatgcgcgagggccacgcaaggatcgcaacgcctcgggtatcgacttctttttcatgcaccggcacatgctgcatactgcgcgttccatgcaggacctgccgtcctgggagcgtctgccgcgacctgtggtgccgctggagtacgatcgtcccggcttcatccgttacttcgacaatccggacgggttttccgtgcctccggcctgggtggcagtggatgacgacgagtacagcgagtggctgcatggcctgaaaagcgccgaggcctaccatgccaatttcctggtctgggaatcgcagtaccaggacccggcgtacctggcgaagttgaccctcggccagttcggttcggagttggaactgggcatgcatgactggctgcacatgcgctgggcctcggtgacgagggacccctccaacggcgccccggtcatgaccgaccgttttccggccgattttgccccgcgctggttccgcccggagaacgacttcctcggcgacccgttttcctcccatgtgaatccggtgttctggtcgttccacggctggatcgacgaccgcatcgaggactggtatcgcgcccacgagcgtttccatcctggcgaagtgcagcgccgcgaagtggagggtatccaatggttcgcgcccggtcgatgggtcgaggtcggcgatccctggctgggcccggcgacccatggatgcgggctttcggatgtccaggcgagcagcaactcggtggagctggacgtggaaaccatgaagctggctttgcgcatcatcttcagcgaagaagaccagttgagcggctggctcaagcgtgcgccgcggcggccctggtacgcgcgcaacctgaagctggcgcgcgaccagctcaggcgctgaacggcgaaagagcgagtaaggatggaggaggcccgcgcaacgcgggcctcagtctttccgcgcgagaccctggcggtcgctctgccagccgccgccgagggccttgtacaggccgaccgaggcctgcaggcgggccagtcgcagttgcacggcggcatcctgcgccgcgtacagcgtgcgttgcgtttcgaggaccgtcagcagggtttccgcgccggcctggtagcggctgtcggagagatcgaaggcgcgctgcgcctgctccagctcctgctgctgccagtgcaactggcggtcgaggccgtcgatgctgttcagcgagcgttcggtgtcggcaaaggcggtgaggatcgccttgcggtaggtttccagcagttcttcctgacgcgccaggctgcggtcgcgctcggcgcgcaggcggccgtggttgaagatcggggcgagcaggttggcgcccaggttgtaataggggttgcggaaagtgtcggcggcgcggttggcgccggacgacagcgaggcgctcagggtcagcttggggaacagcgccgcgcgcgccacctgcacgtcggcctgggccgcggccagttgcgcttcggcgttggcgatatcgggacggcggctgagcagttcgctcggcaggcccgctccggtctccggccagcgcaggctgtcgaaaggccgctcggccacctgtagcgcctgcaccggctcgccgatcagggtggccagggtaatcagcgcctcatgggcctgctgctcgagcagcggcagctgcttgcgctggctggcgaccaggctgctctgctgggcgacctccagggcggtggccgagcccgcggcatggcgggtctccaccaggcgcaggacgtgctcggcgttgtccaggttgagcctggcgatgcgctgctgttcgcgcagcgccaatacctgcaggtagctgttggcgacgccggagagcagggtcagctctaccgttgcgcggtcgtactcgctggccttgaggctttccagggcactgcggtaggcagcccggcgaccgccccagaagtccacttcgtagctggcgctgaggccggcggagaaggagtcgacggcatcgttgtcggaggtcgcgtcggtaccgctgtagcccgagtcgcgcaggagtttctgccggctggcgccgagcgtcgcattcagctccggcagcaacggcgcgccggcgatcaccgccgaggcctgggcctggcgtacgcgggccaccgccgcgccgaggtcctggctgttcagcagggcgcgttgcagcaggctgtccagttccggcgcgccgaaggccttccaccactggcggatgtcgctggcatcgctgcgcccggccgccaggtagcgccactgagggggcgcggccaggccgctgtcgaggggcgccggcgtgctgccgcaggcgccgagcagcaggcaggcggaaatcagggagagattcttcatggacatgtccgtcattggctggccagggcggccaccgggtccagctgggcggccttgcgcgccggcatgaagccgaacaccaggccggtgaccagcgcgcaactgaaggcgccgacgatggccgacagggaaaaggccaccgcgacctggccgagcagcagtacgccgccgatgcacagggccagggcgatcccggccaggccgccgaccaccgagagcatcgccgcttcggtgaggaactggcggaggatatcgccctggcgggcgccagtggccatgcggatgccgatctcgcgagtgcgttcgcgcacggtcatgagcatgatgttcatcacgccgatcccgcccaccagcagggagatcgcggcgatcgagccgagcatcagcgacagggtgttctgggtcttcgcctcggcctggatcatcgccgcgttgttggtcagctcgtagtcgcgctggccgcggtgcaggcgcagcatcaactggtcgatggcgcgttcggcctggtgcacgcgctgggcgtcggcggcggcgatgatcacgtactcggggttgcgcgtgccgaacaggcggatgctggcagcggagtaggggatggcgatgcggttgtcggcatccttgtcgccggagctggagcctttctcggcgagcacaccgatgacctggaacggcacgttctcgatgaggatgtagcggccgatcgggttggcgctgccgaacagcttcttgcgcaccttgtagccgatcaccgcgaccgtggtggcggcgtcttcgtcgcgctcggtgaagtagctgccctcggccaccggccagttgaggatttccgggaagtcggtgttgttgccgccgacgtaggcgtggtagtcgatgttgccgtagcgcaccaccagctcgccgccgttcaccggcatgaccttcttcacctggggcagggtggcgatggcggcgacgtcgtcgctgctgacgatgcccatcggcgcgcgcgggttcggcgagtagccgctgagatagatgatgttcgagccgaacgcgcccatctgcgccatcacctggcgcttgctgccctcgccgacggcgagcatgaccaccaccgaggcgacgccgatgatgatcccgagcagggtcagcgcggtgcggaaccgattgatccacatcacccgccaggcggcgcgcaccgcctccagcagttcggcgcgccaggcccccgagggttcgctgctgccctcggcgaggcgctggctgagatcgtcggcctgcaggtggcgctcgacgccggcgctcgggtgcgccgggcgctcgtcgttggcgctgtcgctgacgatctcgccgtcacgcacctcgatgatgcgcttggcgcgggcggcgacgtcgcggtcgtgggtgatcaggatcaccacgtggccctggctggccagctcgtcgagcagcgccatgacttccgcgccgctgtggctgtcgagggcgccggtgggttcgtcggcgaggatgatatggccgccgttcatcagcgcgcgggcgatcgatacccgctgctgctggccgccggacaactggtgcggacggttggcagtgcgctctgccaggcccaggcgctcgagcagggcccgcgcgcgggtgtgccgctcgctcgccggggtgccggcgtagatcgccggcatctcgacgttttcctgtgccgaggcggaggggatcaggtgatagccctggaacacgaagccgaatgcctcgcggcgcagccaggcctgctcgtcgctgtccagttcggcgacgtcgtggccggcgaagtggtagctgccggagctgggccggtcgaggcagccgaggatgttcatcagggtcgacttgccggagccggaggcgccgacgatggcgacgaactcgccggcgtggatcgacagcgatacgcccttgagtacctcgacttccggagtgccattgccgccgtagcgcttgcggatgtcgcgcagttcgatcagggggacgggttgcgtggcgttttccatcagctgtcgctgccgtcgggagcggccatcagcaggcggtcgccttcctccaggccggcgagcacctgtacccgcaggcggtcgctgatgccggtcctgatctggcggctctgcggcttgccattgctgccgaccacccaggcgacctggccgcccttgccgtcgtcgtgaatggcggcgaccggcgcggtgaggatgttttccgcggtggcggcgacgaagaacacctgggcggtcatttccgccatcagttggtggtcgccgttgtccacgtcgaccagcacggtatacagcaccacccggccgctgccgctctgcccgccgctgccgctggtggggctgccgccgccctggttgctctggtccagcggcttgggcggcaccgggaggatctgccggaccttgccggtccagcgccggccttcgccgctgagggtcgtgaagtaggccggcatgccaggcttgacccggccgatgtcggcttccgaaacctgggcccagacggtcatcggcgacaatttggcgatccgcaggatcaacggggtctgctgctgggcattgagggtctggccttcgcgcgcatcgaccgccaccaccgtgccggacatcggcgcgtagatgcgggtatagccgagttcggcttcgtcgctgcgcaacgaggcctgggcctggcggatctgcgcctggtacatctcgatccgtgcctgggtggcgagcatctgcgcctgggcgctctgcacgtcctcggtacgcgtcgcgccgccggcggccagccgctgctggcgctggtactgctggcgggcgagggtgtactgggcacgttgctcggccaactgggccttgagcatctcgatcgaatagcggccggcatcgaccttggcctgctgggtggaggggtcgatctcgaccagcaactggccttccgtcacatcgtccccggcctcgacgtgcaacttgcggatctgcccggaggcctgggcgccgacgtcgacgtagcgccgcggttgcagggtgccgagcgccgagacgctgctctcgatgctgccgcggctgacgctcacggtatcgaagctgttgctgcggaacggataggcctgccaggcggccagggcgatcagggggctgaagcagactgcgacgagcagtgcgcgacgagtactacgggttcgtctcattcgggaatccggccggtgcgtggagagaccgccgccgctggatcggcaggctgggcactgccagatatacgaggccagggcggctaaatttaacctgggttcagagctgggcgtaacggctgctgatgcggatgctgccgtcctcgcgatgttccaggtccacgggcaggactttcggcagggcgtcgaccaggctgcggatgtcgcgggtgctgtagatcccgccaatgcgcagtttcgcagcgctcctgtcgcccaggaccagcggagcgtcgaggtagcggttgatcagcggcagggccttggacaggggcaggtcgtcgagtaccaggcggccctcgcgccaggctagcgtctggcgggtatccacggcctcgaccaacggttgcagcaggcccggatagtagctggcctgcatgccgggagtcaggctgctgtcgttgcccgagccttcgctgcggaccttcaccgagccctcggtgacggtgactaccacgttgtcctggtacttccagacgttgaagcgggtgccggtgacggtgatcgagccgttgccggccttgaccacgaaggggtgcgcgctgtcgtgggtgacatggaagtaggcctcgcccctgtccagggaaacccggcggatgtccttgaaattggcgaagctcagctgcgtattgaggtccagttcgacctcgctgccgtcgggaagaacggcatgcctgacgttgccctcggcctcgtagcgctggtagttggaaggaatccagccttgcagccagccgaggtagccggccgtcggtaacataagcagggcgagggcggcggcgcgtgcctggctcttccagcccctgcggcgacggccgagcgggcgggttgcggcgtggttgcgaagctcgggcgccggcgttcgcggcagcagttcgctgagcgcccagatctcctccatttctgcgtattcggcggcgtgccggggatcggctgccagccagcgctggaactcgccacgctcttcctcggagaagtcctcggcgtgcaggcgcatgcaccaatgcgcggcgtcctgcacaagggtgtcgctgtcggcgggagagggtgtcttcatcgagggttccagttatgccttcggattgcgctgcgagcgaaacaaggctttaaagcttgatgagaattattataaatttaatgatttcatactgccaatgtcgccggcaggcgatcccgcccttggaaggacagtgccgtagaggcagcgagcaggagtcgtcttggaaaaccattatcgggagctgctgcgattcctcagtgccaggctcggggatcgacacgcagcggcggatgtcgcccacgacgcgtatttgcgcgttctggagcgctccagtcaagcgcagatcgagcatccgaaggcttttctgtaccggacggcgctcaacctggcggtggacgagcaccgtcgcagccgggtgcgccgggcggaacccctggaggtcctggacgacgaggagggcctggccagtccctcgccgcagacggtggtcgaccaggggcagcgcctggacaacctgcagcgcgcgctggccgagttgccggccatctgccgcagttcgttcctgttgcgcaagctggacggcctgtcccattcgcagatcgccgaacatctcaatatttcccgcagcctggtggaaaagcacatcgtcaacgcgatgaagcactgtcgggtgcgcatgcgcgaatgggaagccgactgatttcgctattcgtgctcggcaacgcttaaatttcatttccctgtcctcgttcctagtcaacagatggccctccagggctgctctcgacttatcgctcccgcttgaaagggggccaatccagaggaactggaaatgactcaggcaactgcaaccgccgtggttcacgatctcatcggtgtcggcttcggcccttccaatatcgccctggcgattgccctccaggaacgggcccaggcgcagggcgccctggaagtgctgttcctggacaagcagggcgactaccgctggcacggcaacaccctggtgtcgcagagcgagttgcagatctccttcctcaaggacctggtgtccctgcgcaaccccaccagcccgtattccttcgtcaactacctgcacaagcacgatcgcctggtcgacttcatcaacctgggcaccttctatccctgccggatggagttcaacgactacctgcgctgggtcgccagccacttccaggagcagagccgctacggcgaagaggtcctgcgcatcgagccgatgctgagcgccggccaggtcgaggcgctgcgggtgatctcgcgcaacgccgacggcgaggaactggtgcgcaccacccgcgccctggtggtcagtcccggcggcaccccgcgtatcccgcaggtgttccgtgcgctcaagggcgacggccgggtgttccaccacagccagtacctggagcacatggccaagcagccctgcagcagcggcaagccgatgaagatcgccatcatcggcggcgggcagagcgcggcggaggccttcatcgacctcaacgacagctacccgtcggtgcaggccgacatgatcctgcgtgcctcggcgctcaagccggcggacgatagcccgttcgtcaacgaagtgttcgcgccgaagttcaccgatctcatctacagccgcgagcatgccgaacgcgagcgtttgctgcgcgaataccacaacaccaactattcggtggtggataccgacctgatcgagcgcatctacggcgtattctaccgccagaaagtctccggcatcccgcgccacgccttccgttgcatgaccaccgtggagcgcgcgaccgccaccgcccagggcatcgagctggcgttgcgcgacgccggtagcggcgagctaagcgtagagacctacgacgcagtgatcctggccaccggctatgagcgccagttgcaccgccaactgctcgaaccgctggcggagtacctcggcgaccacgagatcggccgcgactaccgcctgcagaccgacgagcgctgcaaggtggcgatctacgcgcagggcttcagccaggccagccacggcctcagcgacaccctgctgtcggtgctgccggtgcgtgccgaggaaatctccggctccctgtaccagcacctgaagcccggcgctccggcccgcgccctgcacgagcacgccctggccagctgatcggcgccacgccgccacgccctgtgttgcccgtttccccgccaggggatgcccggcacgcagggcgttttcgttgcatgtcccggccgttccggccaccactttgcagagaaacgacatcgatggggatgcgtaccgtactgaccggcctggccggcatgctgttgggttcgatgatgccggtccaggccgatatgccgcggccgaccgggctggccgcggacatccgctggaccgcctatggcgtgccgcacatccgggccaaggatgagcgcggcctgggctacggcatcggctacgcctatgcgcgcgacaacgcctgcctgctggccgaggagatcgtcaccgcgcgcggcgagcgggcgcgctatttcggcagcgagggcaagtcgtcggccgagctggacaacctgccgtccgacatcttctacgcctggctcaaccaacccgaggcgctgcaagccttctggcaggcgcagacgcccgcggtacgccagttgctcgaaggctacgccgccggtttcaaccgcttcctccgcgaggccgacggcaagaccaccagttgccttggccagccctggctgcgggccatcgcgaccgatgacctgctgcgcctgacccggcgcctgctggtcgaaggcggggtcggccaattcgccgacgcgctggtggccgccgcgccgcccggagcggagaaggtcgccttgagcggcgagcaggcgttccaggtcgccgagcagcggcgccagcgcttccgcctggagcgcggcagcaacgccattgccgttggcagcgaacgttcggcggacggcaagggcatgctcctggccaacccgcacttcccctggaacggcgcgatgcgtttctaccagatgcacctgaccattcccggccggctcgacgtgatgggggcctcgctgcccggtctgccgctggtcaacatcggcttcagccgccacctggcctggacccacacggtggatacctccagccacttcaccctgtatcgcctggcgctggacccgaaggacccgcggcgctacctggtcgacggtcgttcgctgccgctggaggagaagtccgtcgcgatcgaggtgcgcggcgccgacggcaagctgtcgcgcgtcgagcacaaggtctaccagtcgatctacggcccgctggtggtctggcccggcaagctggactggaaccgcagcgaggcctatgcgctgcgtgacgccaacctggagaacacccgggtactgcaacagtggtactcgatcaaccaggccagcgacgtcgccgacctgcgccggcgcgtcgaggcgctacaggggatcccctgggtcaacaccctggccgcggacgagcagggcaacgccctgtacatgaaccagtcggtggtgccctacctgaagccggaactgattcccgcctgcgccattccgcaactggtcgccgaaggcctgccggccctccaggggcaggacagccgctgtgcctggagcagcgacccggccgcggcccaggctggcatcaccccggcggcgcaactgccggtgctgttgcgcagggacttcgtgcagaactccaacgacagcgcctggctgaccaacccggcgagcccgttgcagggcttttcgcccctggtcagccaggagaaacccatcggtccgcgggcgcgctacgccctgagccggctacagggcaagcagccgctggaggcgaagacgctcgaggaaatggtcaccgccaaccatgtcttcagcgccgaccaggtgctgccggacctgctccgcctgtgccgcgacaaccagggcgagaagtcccttgcccgcgcctgcgcggccctggcgcagtgggaccgtggcgccaacctcgacagcggcagcggcttcgtctacttccagcgcttcatgcaacgcttcgccgaactcgacggcgcgtggaaggaaccgttcgatgcgcaacgtcccctggatacgccgcaaggcatcgccctcgaccggccgcaggtggcggcccaggtgcgccaggcgctggcggacgcggcggcggaagtggagaagagcgggattcccgacggcgcgcgctggggcgacctgcaagtgagcacccgtggccaggaacgcatcgcgattcccggcggcgatggccattttggggtctacaacgcgatccagagcgtccgcaagggcgaccacctggaggtggtcggcggcaccagctacatccagctggtgaccttccccgaggaagggcccaaggctcgcgggttgctggctttctcccagtccagcgatccgcgctcgccgcactaccgcgaccagaccgagctgttttcccgccagcaatggcagaccttgccgttcagcgacaggcagatcgacgccgacccgcaactacaacggctaagcattcgcgaatgataagcaatgcctatcagatctgatgggaaaaaaactgacggtttttccgcgctcgttcgtctttaaccatagaggcggcccacagccgcccggttccagggaacacgtgcaggcagcgagcagggatgctcggcttcggcggggacccgctacccactcgtccacgaaaggagcgtcacgatgacccattcgcccgtcaaacagatgttgaaggaggccggcctgaagatgagcctggcccggctgaaagtgatcgatgcgctctgggaagcctcgggggagcagggccgggtgccgatccgcaccctgcaccggcgtctctccgaaaccggtacgccgctgtccctggtgagcatccgccaggtcctcgggcgcctggtggaaagcggcctggtgaccctcgacgaacaggatgtctacagccccggcaaggcttcctggggcggtgccgccggttccgcggcgcccgagcgccgcgccgcggccaacgagcagcggctctgacgcggtatccctgatctcgggcagcgggtaaagtctgccccatgctcaatcccgacgatttccgttttccttccatcgaagcgttgcaggcgttcgaagcggctgcccggctgggtaccttcgagcgcgccgccgaactcctgtcgatcaccggcagcgccgccagcaagcgggtttccggtctcgaggggatgctcggggtgagcctgttgcagcgcgacggccgctcgctggcgctgacctcccacggccgcgagtacctcgaacagatcgcgccgatcctcgcccagctcgcggcggttccgctgcatcgtcgccaggtccagcgccagcagcggctgaccctgcgcacgccgccgaccttcgcccggcagatcctgattccgcgcctggcgtccttcgccgaggcctgtccggaaatcgagctggagattctcctgtcgagtccttcggacggccaggacctgccgctggccgatgtcgaggtgcgcggcgacagccatggcgtggcggccggcgagcggctgctggaggagcgcgtgctaccgatggccgcgccggggctgctgctgggcctgccgcggccctggacgccagccatgctcgccggcctgccgttgctgcgctcgccgctggagccctggcagccgtggttccgcgtggccgggctggactggccggagccctgcgccgggccgcgcctgctcgatttgggcatgaccctggaagccgccgccaacggccagggcgtggccctcgcgcgaccctcgctggcgcgcgcctggcttgccgaggggcggctggtggtgctgttcccgctgcgttcggcgcccacccaccattaccacctgcgcagtcaccaggcctcgccggccagtcagcgtttcgccgcctggctggcggcgatctgccgcgaggcggtggcccagggcagggaattccttccggcggcggacgactgaaacggcggaatttccttccgccgatgccgacaattattccgcctgcggcggtacgtcgcgctctaccatccagccacccccgaaggagtggactgcatgagcgtcatcaccgatatcgaagacctgcgccgcctggcgcgcaagcgcgtgccgcggatgttctacgactacgccgactccggttcctggagcgaaggcacctaccgcgccaaccaggacgacttcgccgcgatcaagctgcgccagcgggtcgcgcggaacatcgagaaccgctcgctgcgcacccgcatgctcggccagaagatggccatgccggtggccatcgcgcccaccgggctggccggcatgcagcatgccgacggcgagatcctcgccgcccgcgccgccgccgagttcggcgtgcgctacaccctgtcgaccatgagcatctgttccctggaggacatcgccacggaagtcggccagccgttctggttccagctctacgtgatgcgcgaccgcgatttcatcgaacgcctgatcgaccgcgccaaggccgccggctgcgacgcgctggtgctgaccctcgacctgcagatcatcggccagcgccacaaggacctgaagaacggtctctcggcgccgccgcggccgaccctggccaacctgctgaacatcgccaccaagccgcgctgggcgctgggcatgctcggcacccggcgtcgcggtttcggcaacatcgtcggtcacgtcaagggtgtcgacgacatgggctcgctgtccgagtggaccgcccgccagttcgacccgcggctgaactggggcgacgtcgaatggatcaaacgccgctggggcggcaagctggtgctcaagggcatcctcgatgccgaggacgcgcggctggccgccgactccggcgccgatgcgctggtcgtcagcaaccatggcggacgccagctggacggtgcgccctcgaccatcagcgcgctgccggcgatcgtcgaggcggtgggcgagcgcatcgaggtctggctcgacagcggcatccgttccgggcaggacgtgctcaaggccatcgccctcggtgcgcgcgggaccatgatcggccgtccctatctctacgggctgggcgcgctgggtcaggccggagtgacgcgggcgctggagatcatcgctcgtgagctggacctgaccatggccttctgcggccataccgacatccgcgaggtcggccgggacatcctgttgccgggaagctatccgcgatagccgcgaacagcgaatggaagggaagggaagagcgcaagccgcgcggctcgacggccgcgcggcaaacaggatcaggcggcggaactccagcgcaggacgatgctgccgtcgcgctgcgggtcgagcagccactggttggaacggtcgaagctttccagcaggtgggcccagtcgccctcgtcttcgccgggcaatcgggaaatgcaggcctggcaggcctgttgcgcggccggggcgtggatgatgcgctggatgcgggtgttcagcaggtcataggccgtgggcagggcggggatcgatgcagtgtggttcatgggtgcctccgcttgctttctcggttatgggtgggtggacaaaggaaccctcggttccggcgagatacctttgtagcggaactcgtgtgaagaaagtattgcaacgttgtcgcaggggcacgccgcagggatgtacggctcttggcaacggctctggcggtaggcgacactgcgtcgcgaggaaaatcgttgcgcattgtttcaatgcgcggaaaggcgtttttccagggatgggctttgaccggcacccagtgcaaggcaaggtgaccggtacttctcgacggatacgactgcatggcgttagaaccttccgatgttttgctcgaatcggtgttttgtcagctggatgccgacaccccgcgttccctccatgatctcaagggcgaccccagggccaacctgctggcgatccgcctgctgttccgccagggccgcatcaccggcgtgctgctggacgaccccagcggtgccgaggaccagcatgggccgttgatctaccacgccgagcgcctgcgcgtgcggcgcggctaacgccgtttcccctggccgagccgctcgctttccggcgagcggcgaggagcgggccaccgggaaggctgcctcgctcgggcgattcccgcccggcttgggtatcgttgaattccattcaacgatacgttcagttctgccaggttatgtgccgcagtcctctcgccaataatctcccttcagtccgatgagagactcgccgcgcccatgggggcggcgcagtcgccgtgcgactccataaccagaaaccagaaaaggcgtgcaccgatgattaccctgaacctcaatggcaaggatcatcagctcgatgtcaccgaggatatgcccttgctctgggctatccgcgacgtcgtcggctataccgggaccaagttcggctgcggcatgggcctgtgcggctcctgcaccatccatatcgacggccaggccacccgttcctgcatcacgccggtgagcctggcgcagggcaggaaggtcaccaccatcgaccacctgcacaccgacaaggtcggcgaagtcgtccagcaggcctggctggacatcggcgtggcgcagtgcggctactgccagggcgggcagatcatgtcggccacggcgttgctgaagagcaaccccgcgcccagcgacgagcagatcgaggcggccatggccggcaacatctgccgctgcggcacctacaaccggatcaagacggcgatccacaacgcctccgccaagttgcaggaggccaaggcatgaagcgctcgtaccccgacgatctggtcatcggcaatctcagccgccgcggtttcctcaagggcgtcggcgccaccggcgtgctgttggtggctgccaactggggctggcgcgacgccctggccgccgagaagaaggccttcggcgccgacgccatgccccacggctgggtggacaacccgaagatctacgtgagcatcgaccgggacggcacggtcggcatcgtctgcaaccgctcggaaatgggccagggcgtgcgcaccagcctggcgatggtggtggccgacgagctggaggccgactggagccgggtcaaggtgatccaggcgcccggcgacgaagcgcgctacggcaaccaggacaccgatggctcgcgcagcatgcgccattggttcgaacccatgcgccgctgcggtgcggcggcgcgacagatgctcgaacaggccgcggccaaccagtggaaggtcccgctgggcgagtgccgcgccgaacagaacaaggtgctgcatgcgcccagcggccgttcgctgtccttcggcgaactggccgaggccgccgcgggtctcgaagtgccggcgcgcgacaagctgctgctgaagaagcccgagcagttccgctacatcggcaaggacgtggcgcgcgccatcgacggcgccgatatcgtcaatggccgcgccggcttcggcttcgacgcgcgcttcgacgacatgctctacgccgtggtcgcccggccgcctgtctacggcggcaagctcaagcgctacgacgccgccgcggcgctgaaggtgccgggggtggtcaaggtgatcgagatcgagggccggccgatcccgtccgagttccagccgctgggcggggtcgccgtggtggcgcagaacacctgggcggcgatcaaggggcgcgaggcgctggtggtcgagtgggacgccggggtcaacggcggctacgactcggtggcctaccgcaagcaactggaagaggccgcgcgcaagccgggcaaggtggtgcgcgacagcggcgatgccgcggcgctgttcgccaagggtggggatatcgtcgaggccgagtactacctgccgcacctggcccaggcgccgatggaaccgccggtctccaccgcctggtacaaggacggcgcctgcgaggtctgggccccgacccaggcgccgcaagtgacccgcgagcgcatcgccgagcgcctgaaactgccgttcgacaaggtcacggtcaacgtgaccctgctcggcggcggtttcggccgcaagtccaagcccgacttcgtgctggaagcggcgatcctggccaaggcgttccccggtcgccacctgcgcgtgcagtggacccgcgaggacgacctgcatttctcctatttccacacggtctcggtggagcgcctgcaggccgtgctcggcgccgacgggctgccgcaggcttggctgcatcgctcggtggcgccgagcatcaccgcactgttcggcccggacagcaagcaccagggtgccttcgaactgggcatgggcctgaccaacctgccgttcgccatccccaacgtgcgcctggagaaccccgaggccccggcgcacacccgggtcggctggttccgctcggtctccaacatcccccacgccttcgccatccagagcttcgtcggcgaactggcggcgaaggccggccaggacccgaaggactacctgctcaagctgctcggcccggcgcggcgaatcgacaccgccgaactcggcgacagctggaactacggcgagtcgccggagcgctacccgctcgatgtcggccgcctgcgcggggtgatcgaggaggcggcgcgccagtccggctggggcggcgagctgcccaggggcagggcgcggggaatcgccgcgcactacagcttcgtcacctacgtggcggtggtgatcgaggtggaggtgaaggacgacggcgcgctgctggtgcacaaggccaccatcgccgccgactgcggtccgcagatcaaccccgagcgcatccgctcgcagctcgaaggcgcctgcgtgatgggcctgggcctggcggcgctgggcgagatcagcttcaaggatggcaaggtccagcaggacaacttccaccagtacgagctggcgcgcatgccgctggcgcccaaggcggtgtcggtgcatctgctcaagccggatggcgacctgccgttgggcggggtcggcgagcccggcgtgccgccgatagcgccggcgctgtgcaacgcgatcttcgccgccaccggcaagcgcatccgcgagttgccgatccgcaatcagttgcaggggtggcggaaggcctaggtccttcgtcctggtcgtcgcctgcgtgagttcgcgcgagcgcaggcgatggatcaggttctacgcggaagtcgttgtcgaagaagagttttccgtgccgtcgtccttccctggcagaggcctgtcggcggataacgcgggtggcctcgttcgccctgcgcagcgaaggcggcaagcggacgccagggcggacaacgggtagcgttatgcgccgccttgtcgtctcaacttaaagtgaattctagtattttatttatcttattgatcaataggataaatcgtttattaaaagtattttataagaagtgggagtcttcccagccgctccaggccgcctgcttgccgtcgaaacctgataggcaattctccaggatcgacgaccccgcgtcgtccgtgcgcgaggccgtcatggcggttcagtagatcggcaggtccggttcgggcagggcgacgatgtcgttcgccgtcagccccagcaggctcatcagcgccgggtcgcgcaacggcgactcgccgcgtaccgggccgaagatttgcgccatgtgcctgcgcaggctggccacccgttggcgatcggccatccagcgggtgaaatcgtgcacgtcgacgttcttcagcgactccagtggcggcagcccaggcgcttcgccgacgtcggcgcgggcgcgccagccgccgtagctggactggaactcggccgagcccaggtaggacagcagcagcttggccgtggccggatgacgggcggccttgaagatcgccgcgcgctggttccagacgatgaacggctcgtcggtcgggatgaagtagccggccggcgtatcgctgtcggtcgcatagccggtcaggttgcccagcgaaccgatggagtcggtgcccaccgaggccgccggcgccgccgtgccgcgcaggaagttcggcttctgcgctgccagggcgcgcaggaaaccgctgccgtagcgccgttccagcttgtcgtagacgtacagcaccgcatcgtcgtcatggggataggtcagcaccagcttgcccttgaaggccggcttcaggtaatcggcgaagcgcgtcggatagcgctccgctggcagccggacggaagcgtaggtcggcacgaaggcgttgttgtaggccgtgacataggcgccgtcgggatcggcgtagcctttcttctgccgggcgaagccgaccggcttgtagcgcagcagcacgtcgcgggccttccatctgtcgaaatcgaaggtggtttgcagcatcgccacgtccggcgtcagggtgccggcggcgagttcctggtcgatgcgcaggtcgtggaacttggaaaggtccaccgtgacgtccaggatcacgccgggaaagcggctttcgaaggccgtcttcaaccagtccatctggttcggcgcgtcgccgccggcccagagcaccaccttgccgccttcgccccgtgcgcgggcgtagagcgaagcgagcctgtcggtctcgccgggaatgaccagggtcgcccccgcggtttccggccctagagctggctttcgtggcaattttcccgccgtttcgctggcgaacgaagaagatgcgaagaccagaacccatgccgccatcagcggcttcaccctgtcgatcatgtgccgttcctctgctgaaaacgagcgtcgccgctcccggtgaggccggcgcgcaggcgcgcccctcatggatgggactggtccgccgcgacgggcttcagcgccgcgaggagacttcgcggaaaatcgcggcagacttctcgtttcggcattctcggatgcttgcgcgggaactccgggtacggccgcgtggaacctgcctagaaaccggccttcaccgccagcgccgcggcggccgtccgcgtgttcacttccagggcgcgcagcagcgaggaaacgtgcacgcgcacggtgaacggagagatcgacagcgcgcggccgatttccttgttcgacaggccatcggcgatcagccgcagtaccgcttgctgccgtggggtcagggcgtccaggagggcgcgttgccgactgccggcgctcgacccgccgcgcaggcgcaccaccggttcgccgctgccgagcgtctgcaacgccgtgccgatctccccggcctccagggatttgccgaggtagccgtcggcgccggcggccagcacctcgtccaccagacgcgggtcgtcgagcatcgagacgatgacgattgcgctgtgccgataggcgcgacgcaagcgctcgatggactgggaggcggcgaagccgggaagcagcaggtcgaggacgaagagggcgggaggttccggcgagacgctcgaggccaggcgcagcacctcgtcgaagctgcccgcttcgcttacggcggcttgcgggaggtagcggcggacgacccgtctcaggccatcgcggaacaggggatagtcatcggcgacgatgacccgtgcggggaggcttcttgtgctaggcattgtcgtcccgtccttgggggcggccagggtacgccaacccctgcatcgaccggccgcgggccggccggcgagggcgctgcgggcaccgttcgatccgccgaaaatcctttttcgtcgatccctgtcgcggggctccgccccgcatcacagcggaattctagcgccgctggcgacacgcatgtcgggcattcgtcagaaaaacagcaagccagccccacggcgagcgcgatgggctggtctatcctgctacaacgccatcgcgctcgggaggacggcatgggctgcccgcaggtctgcgccggcgccaccctgcaatgcagcttcggggcggcgccgacggtgctcaacgtgttgccgcagaaccgcaccctgaccagcgggatgccggcggcgaacatcatggaccacatcccgctgctgaacattcccaccttcggtctctgccagagtccggccaaccccgtggtggccgccgccaccgccgccgccctcggcgtactgacgccgatgccgtgcattcccgccaccgccagcccgtggatccccggcggcccgccgaccctgctgctgggcgggatgcccgcgctggacgccaatggcacgctgatctgcacctggggcggagtgatcaagatcagcgtgccgggacaggtgcagatgctgattccctgagcgccgcctggccgatgcgcgcctagggctccgccagcctggtccaccaccagcgccagcgcgccatgggcttgccctcgctgtccagcggccggccgtcgtcggcgaacggctgggcgccgtccagtagctggccgttcaggtagcgtccgtcgaaggccagttggccattgccatggaagcgttggtagaccccgtcgcgtacgccgtcgcggtaatgctcgcgctcggccacctggccgttggcgaaatagttgagcgcttcgccgtggagcagcccgttgcggtagtgcgccttgcgctgcaaccagccttccgcggcatggaaactcgccggcccgtgcagcttgccgtcgacgaaggcgagttgcgcggagaccttgccgttgggatggaacagggtgctggcgccgtgcaactggccctgccggtagccgaggctggcctgcggcctgtcgtgctcgtcgatgcgcaacgggccttccaggctgccgtcgagcaggttgccggcgagatggctgtcgccacgaaccaggtcgagcttgccggatgccgccatgcgcttctcctcagttgacctttaccaggccgcccttgatggtcagcatgccgccgccgtccaccgtctgttcggcgccggccttgttggtcaggctgacgccggcatcgttggtcaggctggtgccggccttgttggtgagggaggtgccggcctggttggtcagcgacgtcccggccttgctggtcagcgaggtgccagcctgggcggcgaggtcggcgtcgctcttcagggtcaggctgccgccgctctgcagggcgagggtgccgctgaccttgatggtcaggttgccgtccaccgtcagctcgaagttgccgctgaccttgtggctgtagttgccgccggtgctgtgggtctggtcggcgcccaccgtcaccgtgcgcgtgtccttcacatccaggctgtcgctgccggtctggatggtcaccgtgcgcttgcctttctccagggtgacggtctcgtcgccttccttcaccgtgcgggtgcgtgcgttctgcaccgtcagggtctcgtcgtggccgatgctggcggtgctgtcgttgagcacgttgacgttgaggtccttctgcgcctggaggaagacctcctcggcgtccttcttgtcctcgaagcgcagctcgttgaaaccgccgccgcccttcgacgagttggtcttgatcccggactgcgtctggttgtccggcagcgcgtagggcagggcgttgtcgccgttgtagacgcagccggtgaccagcgggcggtccgggtcgccgtcgatgaaggtgacgatcacttcctggccgatgcgcggcacgaactgcatgccgaagcccttgccgctccagggcagcaccacgcgcacccagcacgacgaggtctcgtcgttcttgccgtcgcggtcccaggggaactggagcttgatccggccgtactggtcggtccagatctcctcgccggccttgcccaccaccagggcggtctgggtgtgcatgcgcggcttgggcgtgacccgcgcggggcggtaggcggtggccttggggatcgcctcgaagcggttgcggtagtgcgcgtgactggcgtcatgggtgaccgaggtcagcacccagtcgatattcagcgaatcgtcgtcatgcccgctgagggtgaaccagtggccgggcaccagccagcggcagtcgctctcgccgatcaggcgcttttcctggctgcgcaggccgtccacgcgctgcttggtcagcgcatcgccgcggcccttggcggtgtagccgccggggtgttcgtaccgtgcgcgcggcccggcctcggcctgtgcctgggaatagagcgaagtactgggtgtggtgaactcgtagtcggtggcgctgtaggtcccggcgaccgcctgcaggcagtactgcgccgaacggatgccgtgcagttcgcgcacgccgatctcctggtccaggtatggcaccttgggcccgttggggatcggcgggaaggcgtcgttgctgtccgccagcaccaacgtgtgcttgcccacttcgtggatgaagaaccagaagatgccttcctcctccagcaggcgcgagacgaaggcgaagtcggtctcgccgtactgcacgcagtattcacggggctcgtagctgccggtcagcgacagcttgaagtcggtgaagccgtgggccttgaagatcgtggtgacgatgtcgctggtggcgaggttctggaacacgcggttgttgctggccagggtcagccaccagagccatggtctgagtacgagttgaaaacggtcggcagttgcgtcggcggggagctggtggatttcggcgaccagggcgtcgagggggcgttgctgggagtcgttgtgcagggtggcgctgaggtgcgaggcgacggtgttggatagtgtcagcgacgtggagctgttgccctggagagacatgctgtccaatgtattcagcctctcgcctccggttagggtttccagatttaggtcgctcaacaactcggcgactaatgagaggctgctggtatcagtgccgcgagacatggtcggtcaccagttcattcgggcgcagagaatgtcgtgggtactagcagtggcggtgctgtagtcctcggaaaagttgaatgcggtatgtggcggcgatgtcgccataatgtggtcgaggttattggcaaccccggtgaagttgtccagtggggtatagccggcatagctcttgcccagtgctgccggcttggcgttcatgtcgcctgcgatgacgatgaagtccgggacgacgccgatcgcgagcatcgggttgttgagcagtccgctttgatccagcgccagataagcgtcgatcaaggctccaccgctcatcgagcccacgatgatcggtagcaaggacacgccaaggggggcatgccaggtgattagcaggatgttgctgccgccgacctgcagaaggctataggcgggtgttctggcaggtggcgtccaactggatgcctgtaaggcagtatggcctgcccaggccatgaatcccggatcggctgcatagttccagagtgcaaggggagtggacacagtcacactcgcattgcgcgtagcacagatataacccttgcccccacctccaagattttcatggatgtgatgcacggtgtagccagcgaggccagtcagatagttactgatggcgcctcctgcaccttgttgagcctcctgaatgaggtaaatatcgatcaccgggtgtgtggcgtgagcggcatgggtggcagcctcggcagccagacttgccgccttcggaaagctttcgccagtactattccaggtcaggattctgatggagggcatgctttttacatccttgtgcttctgggggctgccatgtagaaatggcaaccctacctttatctggattgttcaggggaaggtagggtccttaaaggcatgtttcgccacatacaccgcagtgccacacctggggcaggagcggtgctcggcgaatatctggacagcagtatttgtacggaatttattgccgcatttggggcattgcgtcaggccagtttgctcgacagcgtgcggtgctgctttaggtggggagccgtcggcttttttgtatctgggcgtccgcagccaagttggatacttgcgatgctcgcgcccttccaaagtcacgatccacatctctggccgatagggaatgaaggcctgatccttgtacggcagcatgccttgtagcgcggtgtgtagggcctcgcggcgagcttcgtcgactgctggtgctccccctcgggggttgtagactgtcagccgtgtagcctcaaattctctccggttgaatagtgagagaaagtcttccatggcgtcatacagccgctgcaacgcctgcattcttgccggctctgtcccctgaaggccgtgcctgaaaagatctaggtcggtgccaccctcatcgtccctgtcggcgggcccttcgacaatgttccaggcaggccaggagagtttggcgtaaagctcatcgcagtcctcttgggtcatctgggcattcatcagcctggaaatcaagggcccccacgaaaccactccgatgacttttacgtagagcacgcaccctttccagtagtcgcacatcagcaaggcttgccaagtatcgcgcagtgtctgccaggggatgatgtggtgatacttccacgaaatgtccgggaccaactgcgtgcgcttccagtggaatggaacgctgtcacgctcattgggcttcactccgctgaaagatccgctcttagtgatcgacacagctcctcctaattgatgcttctgaataacttcagtgcgcgtgccagacagttgctgcttgaccaagtaacggagtggtgatgcttgtagctactccaacacccactccgccaacttccccgtcacctgcgccatcagcacgttctcgatatcccgcgcgcccgccgcgctgcacttggcgagcacggccttgacgatggccgggtcgaagtcgaactgtttgccggtagcggccttgtagcgttcccgcagtttttccagcttggccacgacgatgccttccagggtggcttcctccagcggccggtaaggcaccacggtcatgcgcgcgaggaacgccgggcggaaggtttgcagcaggactttgcgcaggcgctcgtcgaaggccggggtggcgacctgttcggccgggctgtccagcagcagttcggcgccgacgttgctggtggcgaggatcacggtgttcctgaagtccaccaccaggccggtgccgtcttccatcacgcccttgtcgaacacgttgtagaaggcttccagcacgtccggatgggctttctcgatctcgtccagcagcaccaccgaatagggcttgcggcgcaccgcttcggtgagcacgccaccgctgccgtagccgacgtagccgggcggggcgcccttgagctggctgacggtgtgggcctcctggtactcggagaggttgatgctgatcaggttgcgttcgccgccgtaaagggcgtcggccagggcgtaggcggtctcggtcttgcccacgccggtggggccgggcaggaggaatacgccgaccggcttggccgggtcgctgagtccggcgcgataggcctggatgcgctgggcgatggcgcccagggcggcctcctggcccatcacccgctggcccattcgttgcgccagggaacggatggcgtgggcttcgtcggcgagcatcttgcccaccgggatgccggtccagccggcgatcaccgcggccacggtacgcgagtccacctgctcgggaaccagcgggtcgtcctggcggatggcttcgaggccggccgccaggcgcgccagttcggcggccaggtggtcgatgcgaccgtccagttcctcgtcgggcttggccgcgtcggcgctttcgctgagggccagcagttcgcggcggatgtcgagcagttcgcgcaccgcttcgcgttcctcgtcccagcgggtctccagctcgcggatggtccggcggttatcgcccgactcgctttccagggcggtgatacgcgcgctgtggtcgaggccggtggcctgttcccggcgcagccgctgcaattcctcttccagcgcctgctcgcgatggcgcaggctttccagcggcggcggcacgtcgtgctggccgagggcgacccgcgcgcaggcggtgtcgagcacgctgatcgccttgtccggcaactggcggccggagatgtagcgatgcgacagcttcaccgcatcgacgatggccgcgtccatgatctgcacgccgtgatgcagttccagcttgccggcgacgccgcgcagcatctccacggcggtggcctcgtccggctcctcgacctggaccagctggaagcgccgggtcagcgccgggtccttctcgaagtatttcttgtattccagccaggtggtggccgccagggtgcgcaactcgccgcgcgccagggccggcttgagcaggttggcggcgtcgctgccgccttccgcgccgccggcgccgatcagcgtgtgcgcctcgtcgatgaacaggatgatcggctgcgcgctgttgcgcacggcgtcgatcacgcccttgaggcgctgctcgaactcgcccttcatgctggcgccggcctgcaacaggccgaggtcgagcactcgcaggatcacctcctgcaacgacggcggcacctcgccggcggcgatgcgcagggccaggccctcgaccaccgcggtcttgccgacgcccggcgcgccgaccaggatcgggttgttctgccgccggcgcaggaggatgtcgacgcactggcggatctccccgtcgcgcccgacgatggggtcgatgcgcccggcgcgggcctcggcggtgaggtcctgggtgtactggtcgagcagcgggtccggggcgctttccggcttgtcgccgcctgccgccgggcggttcggcgcgggcggctgttcgcgggaggcctggatccactccagcaggttggcctgcaaggcctcgtggggaatccgcagcagcgacgacgcgctgttcagcaacagggcgcggcgctcctcgcggtcgagcagggcgagcagcagcaggccggaacggatctgcgcctggccgagcacgctggcgtggaccacggcgtcttcgagcaggccgatggtgtgcgcggacagcgccggagtgcgggtattgccggccttgaacagctccagcgacaggttgatctcggcgaccagggcgtcgcgctccaggccgaagcgcggcagcaggcaggcgaagtcgccgccgtcgatgtccagcagctccagcagcaggtgctcgatctctacgtaatgatgggtgcgttgcaggcagcgttgcgcggcgcgctccagggcgcggcgacagtcagggttgaggcggccgatcagggcggcgagttccatttcaggctacctccggctgccgcaggtcgagatcgatgcgctgccgctggccgtcttcgacgcgccgcagaccggtgttccagctcagcctgggcggtgcaccgcgctccaggcgcagcggcgcgccgccgctcaccagcaggctcaggcgacaatccaggtcggggccgaagtacagcgcggcgaggctggccaactggccatgggcgtcgccgtcggggaagaagcgggcggcttcgcgggcatccagcggaccgagactgagggcgatgccggcgtgctcgtcccaggtgcgcgtgccggctatggcgtcgcgacccaggcgcaggttgcgtccgccgcgttgcagccggctgcggctggccgcggggatttccttccaggcgccctggtaggcgtccagccgtgcctccacgccgaaatgctggcgcaccaggccggcgaagccggccagggagcgacgcccgccggcgaacagcgcggtgcgtgccagtaccgcgctgtccggcagcgccaggcgctcttgcagggctttcggcaacaggccgctgagggcgcgtagctgcgcctgcaccggggtcgccgccggcaccgcgaaaccgagcgccacgcgatgcttgcgcagtacccggtagagcaggctgagcaggcggtgctggaacaggtcgaggaactcggcgggggcatggtccttctgccgggcacgctgttgcagccattcctggtaggcatagggcaacgggccgtcggggccgccgaggccgaacaccggggtggacagcaccggttgctgcgggtcgtcgagcaggctttccacctcgctcgaggcgaacagcggcagcagcggcccgcgcaggcgcagggcctccgcccgcggcgcgttgccggtgcccagcggcaacgcctggggacgctcgcgttcgagcagcagcagcgcctgcaacagttcgaagcgctgcggcgtgcggcgcagccgctgactcagagggagagcggcgagccggcctggggttgccatgtcttcacctccttgtcggcttccaccaggaccgtgcgcacgaagcggttggcggtggcatacagcgagaagaactgcgccagcacggcggagaacagcacgccgctggcgccgacgaagtgttgcggatcgagtcgcaggcggatttccaggccattgcgccagccgcgccaggcatcctcgccgacgtgcgccaccacccgctggcagtcgagttgcctcagcccttctatctgccggcgggcgctggcatcgtcgcgcaggttgtgcagggctaggatttcccgcagggcttcgagggcgcgcgggccttccaccagcgacaggtggttgagggtcagctgcgagaccagtctccagcgcgactggccgtccaggcgcggctggctctgcgcgctgggcgcgttgcgcaggcgtgcggcggcgaccggcccgggccgttcgaagcccagcgcggtgccggcacccaggcgctcggccagatagcgattggtgcatagcagctcggcggtcaggctgaaggccggggcttcgcgtaacgggtcgaagccggtatccaccaggctcagcagcaggtcgctgcccagccggttcggggtcagcccggcgatgcgccgggcgtgccagtagagcgtgccgaggtggctgtcgtggcggcagccatagtaggccgggactggctgcacggtgctcccggccaccgagcgcacggcgcggatgctatggatttccacgctgttctcgcggtgactgtcggcgaccaggcggtactcgctgcgggtgccgtccgggcgcagcggctccgaggtccgcggaaagaggttgatcgccggcgcgcagccgagctggaagtcttccgcctgcaaatgcaggcgtgccgtcggtgcgcgatcgaagaccaggtacaggtagagcgtctgtccgtcggcgagcgcgccggacagtggcaggtcgaagaagtggaacttgtcggggaaggcgaagtactcggcgagcaggcgcaggcccggatgtccgccgtcttcctccggcagcagcgcctcgtcggcggcgaagccgacgatctccggcagtccgcggagcgccgccggcggcgtgccgggcgcccccgccatgacctgcacggtatgcgcggcgagcaggtcgtagaggatcgcgcagcccatcggcgaagccgccaggtggatgcgcaggcgctcgatcgacagttcgtcccagcggtactcgcccaggcagcgcaggctcaggcgcaacgccgagcgggcggcgccgactccggtcagggcttgcgcctcctcgccgccgagcagggtcgcctcgtcgatcgccagcggccacagggtcgcctcggcgctgctgcggaaatgcacgctgtcgccgccacgggtggtgacgaacagcgcggtgtcgcgcggcagccggtagccctcggcgaggttgccctgggtcgggtccggctcgaactggacgatcgcgcaggacggcagcgggcgcagcgccagggggtagagctgttcgaggagggcgtcgctgaactctgcgtagtcgtcgtcgaggcgccgttgcaggcgcgcggtgagcagcgagaaaccttccagcagacgctcgacgtgcgggtcggggcattcgccgggagccagttgcaggcgccgggcgaccttcggatagcgctcggcgaaggcgccgccggcgtgccgtagccaggtcagctcgcgctggtagtagtcgagcaggtcggcatcaatcgaatcgctcatggcgcacctcaaggccatcgctgccctgttcgatgacgaatagcgcaggcgtcaggcgcgacccgctgcgcaggctgccgccgagctggatacgcaggcgctgcggattgcccgggtcaggttcgacctcgacctcggccagttgcaggcgcggctcgaaatgctcgaccgccgcccgcacctcgcgcgccagctggcgccggtcctcggcgcgcaggcgttgcacggcggtccagtcggcgagcccgtaggcgaggatgccgctgcgcgcattcgccgggcgccgtgtgttgagcaggcgcagcagctcgccgcggaccgactcggccagcgcccggtcgtcgaacgcgggacgttcgtcggcctcggcgctgaggcgctcgaacagcggcggcagggctccggacatgtcggcgcccggtcacttgaccagctggttggcggccaggtcccaggtcgaggcggccgtgccttccttggtgccgtcgtccttctgcgcggtcagctcccacttgatcttggtgaagttcagcgacagggtctccaccggcttgccgccggcgccgccgctgacgctgacgttggagagcaccacgttgttcagggtgtagacgatgaagggcatgatctgcccgttgccctcggcggcgttgcggccgatggtgatggtcgcctcggcgatcggcttgccggcgcagcaatactcgttgagggtcggggtcgaggtgtcgatgaacttggtgagggtgaattcgccgacgtggggtttgccggaggtgcgctccgagttgctgacgtcgttggtgacctgcatcgccacgttgtggctgtaggacatgatttcgatcttgttttcgtagccgacgagcaggctgtcgcctttgatgtcgctgccgaaatcgagaatgatcgcatccatcgcatctgactcctggagaggggctgtctggaacgggaagggcgccccgccggcgctgccggcgggggcggactcacgccgctaccggcggcggcaggttggcgaccaggcggatcgacgcgctgagttcctcgagctggaagtgcggccggaggaacaccgtggcgcggtaggctcccggtttgccggccacctcgctgacatccacccgcgcctcgcgcagcgggtactgcgccttgatttcctgcggtgcgttgtcgttgatcagcacgtagtcggcgatccagttgttcaggtaggtctgcacgttgtcgcgggtcatgaagctgccgaccttgtcgcgcatgatcaccttcaggtagtgggcgaagcgcgatgccgccagcacgtacggcagcatcgccgacaggcgcgcgttggcgttggcctcgttggtgttgtagagcctggccttgttggtggtctggccgccgaagaacaccgccacgtcgctgttcttcttgtggcacagggaaatgaagccgagatcgttgagttccttctcgcggcggtcggtgatcgccacctcggtcgggcacttcagcgacaggtcgccggagctggtgcggaacgtgtgcgccggcaggccctcgaccgcgccgccgccttccgcgccgcggatcgccgcgcaccagccgtacttggcgaaggcctcggtgatgcgctgcgccaggacccaggcggcgttgccccagaggtacttggagtggtcggtgccgttgacgtcctcgacatagttcatgccttccaccggtcgcgtctccgggccgtagggcaggcgcaggaggaagttcggcagcaccagcgacacgtagcgcgagtcctcgctctcgcggaaggcgcgccacttgatcagctccaggctctcgaagatcttggtcaggtcgcgcggcacggccagttcggtgaagctgttcatgtcgaacaggcgtgggctggcggcggcgatgaacggcgcgtgggcagccgcggcgacgttcgacagcttctccagcaggccgatgtcctgcggatggcgaccgaaggtgaagtcgccgatcagcaggctgaaggggtgtccgccgaaggtgccgtattcctcttcgtagatcttcttgaacagtgcgctctggtcgaactcgaccgccttctccaggtcgttctgcagttcgttcttgccgacgttcagcaggcgcagcttgagccgcgcgctggtctcggtgttgctcaccagttggtgcaggccgcgccaggaggcttccagcttctgcaactcggggtggtggatgatctggttgagctggtcgctgatcagcgcatcgatctggctgatgcggtcgttgatcatcgccacggtgtccttgtcgacggccatgccctcgtcgaggacctgggtggcgaattccgcgagcatgtcgcgggcatagtcctgctggctgtcgtcgtgggccatgcggcccttggcgatgatctcgtcgagcagggacagggtctgggtcgaactctcgccggattgttcggcggcggatgacttgggcatggcggcttctccgggaagagggtcaggccggctggtcggccgggggttcgctgtcgccggccggggccgcttcggcttccgggcgggccgctttgatttcctgcaggccttcggtgttggccaccacgtcctgcagtaactggtcgaggtcgtcgttgccgtcgagcttggtcagcaggtcgcgcaggcgctggcgcgcctcgaacaggcgacgcaacgggaccacctgcttcaccaggttgaccgggtcgaagtcctcgatgtggttgaagcgcagctcgacgttcagcttgctgtcgtcgccgctgatggtgttgtcgacctgcagggtggcgcggggagagatggaggagaggatctcgttgaagttgtcgcggtcgatgtcgacgaaacgccgttcgaccagcttcgccggcggggtatccggcttgccggagaggtcggcgaggatgccgaccaccaggggcagctccttcttctcgatggcgttgccgatctcgacgtcgtaggtgatctgcacgcgcggcgggcgcacccggtccagcttgtgctgcgtactctcggccatggcggctgactccgatgcaatggtgggggagcaatgcatcggggggatgccctgatcatcgcagtcccttgctggatcacaggcatgacagggaaaacggcgcagaacctgtccttggcgatccctctggtccgtcactggcgacgaactacaaaagacgctagaacaggtctatggatttgcaaaataaaattttcgttggactcccatgaagcacggatgtttcaccatatgtcggaaactctccctggcgctggcgatcctggcgctggccggctgctcgtatttcttcgcgccgcgggtcgagttgcagcggctgaccctggatgtcgccgcgcgcgccaacgacgactcgccgatcgccgtggatttcgtcgcggtgaaggatgcggagctgttcaaggaactggccggactgccggccagccagtggttcgccaatcgcgagcagtaccgccgcgactaccggcagcagttcgcggtatggagcctggagctggtcccggggcagttcatcgagtcggagtccttccccttgcgcggcgaccgcgcaactggacttttggtcttcgccggctataacacacccggcgcgcaccgcttgcgcctcgaccagcagcagcgcgtctggctgcgtctggatacccgggaaatgcgactggtcaacgatcccgccacgcgttagcggaggggcaggcgagcgaccgtcgtgcacgacaacgtaggacgtcgaaggggagtcgtatgagtgttctgcctgacgcggtgtgctggcacgaagggatgcaactgcttccccagcatttccagttgcagggattgcgtgccgaggcgctggcggcgcgcatcggacaggcctgcaacccttggttctggggagtgaccgccctggaactggacccctctgcgttgtgcgccggccaagtgcgggtcctgcacctcgaagcgatcctgcccgacggcctgccggtgagcgtgcaggctggtgtcgacgcgccgctggagttcgatctggagacagcgctggcggccgccgaagggccgttgctgaacgtccacctggcggtcagtccgctgtggcgggcgggtcagttgctgccgctgaagggccgtctgcaatcgcgggtcggcgcgccgctgccggacctggccagcggcgagcaccccgagccgatcaccgtctggcgagcgtcgctgcggctggtcggcgacgacggcaaggccgactccgtgtgcctgccgttgctgcgcgtggcgaaggagggcggcgcctatgtcagcctgccctacgtcccgccgacgccactgatcctgccggagtcgcccctgggcagacgcgtgcagtcgctttgcgcgcgggcccgggagaaggcgctgttcctcggcgggcgcctgcgcctggcgcagcaggcgggcaaccaggacgacgcggtggaaatccgtcgccagcttgccgcgctctggacccgcctgccggaggtcgaaggcctgctggcaagccgtgcggcctcgccgctggccctgcacggcagcctgctgggcctggccggtgcctgggcggcgctcgatccgctggccggcgtgccggccttcgaagcgctcgacttcctcgacctgcggcgtggctacgagccgctgctggactggttggagcgcgccatcgagtcgatccgcgcgggctaccgctgcctgccgttcgagcaggaggaacaggtattttccgtgcgcctgcccgatccggcgccgcgtcagcgcctggtggtcggcctgcggatgcccgccggcgccggcgaacaggcggcggctgactggctggagcgcgccatcgtcgcctccgacccgcacctgccgttgctcgcccggcaacgcatgagcgggctgccgcggcagccgatgaatcgccaggaacaggtggcctacagcgttggcgacgacacccgtttgttcgtcgtgcagggtgccggcgactggttcgatgccggccagccgctgcgcatcgtcgcgccggtcagcggggtcgccagcagtccctggcagatcgtgctgttcgtcgccgacggcagcgacaacacctagacaggaaggagccgccaatgcccgaagggagtgcagggcctttttcccaggcgtaccaggagcaaccgctcagcacggcattccgccaggcctggcaggaatggctggaggcctggggcgccctcgaccgggacgcccaggatgtgccacggatggtcgagcgcgccctcgaactgtccacccgcatcacccggcgtctgtggcgcagcgccttcgccagcgtcggcgacgcggcgggcgtgcaggtcaaggcgatggtctatgccttcgtcgccctggtcgacgagaccctggtcttcagcgcctggccggggcagggcgcctggcaggacaaaccgctggagtcgcatctctacggcagtcgccaggcgggcgaatacctgccgctggcgatcaagcgcctgctcgacgaacgcgccccggccagtcgcgacctggccaacgtctacctgcaatgcctgatcctcggcttccgcggtcgcctgcgcgggccgcgcggcgaggcgctgcacgagaagtggcggcaggcgctgttcgccttcgcctggcagcgcgaggcggacgccgccgacctcggccgtcgccttgagcagcccgccgctgcgccgccacggcgtctgccggtgcgcgcagcgctgccggacggtttccgcctgggcctggcggtgctcgggctggtgctgttgatgagcggtatcggacacctgttctggcgcgacatccagcatgaaatggcggcggtgacccacctggccgatgcggagcaggcgccatgagcggcgcgacgctgttcatgctggttctcctcctggtgctgctggcgctgctgctgggggcgctgggctggtggtggcggacccggggcggtacggagatccgcagcttctacgcggcggtccggcagatggagcgcgagcagggctggcagggccgctacgaagcgccgtggctgctgatgctcggcaacgagaccgagggcgagcagttgtgctccacctggcgtctgctgccggtggcgcgcccggcctggttcggccgctggtggtcggacggcgagggggcgatcctgctggtgcccgagtcggtgttcctgcccgacgagggcctgcgccggcaaagcggcgcctggctgcgcctgttgcgtctgttcctgcgcctgcgcggcaggcgcgcgctggacggagtggtctggaacattccgctggcgcggctgcaggatggcgagcaggcggccaacctcggcctcgccgcgcgccgtcgctacgtggaactgacccagcgccttggcctgagcctgccggtttacgtggtgatcactggcatggaagacctgcctggtttccaggaacttctcgcggcgctgcccgaggaggcgcgcgagcgcgccctcggctggtcctcgccgttcgccgccgaagcggcctggcagtcgcgctggtgcgagcaggcgctggaggaaatcaccgccaccctgaccgagtcgatcgtcgaactcggtaccttgcgcggccaggtggacaatgagctgtattgcctgccgccacgcctggaaagcctccgcggttcgttgcaggcgctgctcgaaccggtcttccagggcaacgccaggggcgaggcgccgcgctttcgcggtctctacctgagcggcagcgaggcggcgggcgcggcagccgacgatgtcctgccggcggtcgacgcgccgcgtcggcgcagcagcttcgccagccaactgtgggcacggcggatccttgccgaggaaggcctggcccaggcggtgccgcgcatcctccagctgcgtcagcgctggcagcgcgggatcggcctcgccgcgttgtgcctgtgcctgctctggggcggcctgatgacctgggtctggcgcgacgcgctgcgcgacgccggtgaactgtcgcaattgctgcatggcgccagtgagcgctaccagccgctcgacgacgacactcggcgcgccgcccaggtccggcagaacgtccaggcctggtggcaactggtgtcacaggcgccgcgctggcgcttcacttcgctggcgtttcccagttcctggttttcctccctggatgcacgtatcgacaacgcgtatcgccgcgtttccgagcgcctgctggtgcgaccgctgcgcagcctgctggaaggcgaggcgagcgacctgcgggcgatccgcagcgatggccaacccggcctgaaggagggcgacgaccccagccagtggaaggactacctggcggcgaaggacctggtcgcccgcgccactacgctggagcgccacaatcgcttgttcgcccaggccatcgacaaccgcaggacgccgctcgacgaccttctgcaactgagtaacgatgccttgggcagcagctacaacgccggcagcctggcgcgcctggcctattacaaccgcacgctgttcgccgagcgtccggccgatctcgccgccctcgacctgggccgggtcgccgccacggcggcggataacttccatgacctgatggcacgctggctgaacgcctacttcctcaccgacagcctggaacgcaccggcaatgccctgacccaggaactcgcgcagctcggccaggaacgagacgccacggcggcccagttgctggggatcggcgaattgatcaaccacctgcagcaacaggtcaaccgcatcaacctgatctggggcaatggcgtcggccaggatctcgtccctggctaccagaacctgctcaagagcgcccagcaaagcagcttgctgggaaaccgcgtggaggaactgcagaacctcaccgtgcagttgcagcagcagtttcgcagcgaatggatcgcgcctccggaggctgccggcgacggcctgctggtgaaacagggggcgacgctcaagctggccgatgacctgctcggtctgaagcgcgccatcgatgacctgaagaccaaggacttcgtctccgtggccctggcggacaagacactggcggaccactccttgctgagcatcgacgatatcggcgtgactcaggcgttgagcttcttcaacgacttcaccggctactacgagagcaccctgccatcgctcaacccgcgctatcgctattcggtcctgcacgccgccgccagcgcggcgaccgaggccatgtggcaaagcctcgggccgcgcagtcgtagcctggccagtcgcaatgcctcgcgtttcgacgtgcaggtcaagcaggtccaggtgttgcaggcggcgctgctggagttgcaggacctgcaggccggcgcgcgcctgctgctcagcctcaacgcgctggccgtggccgatatcggccaggccctgcgcgacatcgacgagcaggcggtgctgcgcgagccggtcgatttcagccgctggtcgggcgcgccgaatttcggcctgcagatgttccgcgcccaggacagtgccgagctgaagcaaagcctgaacagccagttcaatgccatggcggccgtcgccgaacgccacgccccggcgctggagtggttgcaggcgcagcaatccagcctggccaccgccgactacaacgcgttcgtgcgcttcagcgcgctcaacgccgaactgcagaaattcaaggccgacaacccggcgagcaccgcggcgcagttggcgaagctggtgggtaacgatttcaaccagatggacatcggcagttgcgccgacattctcaacggcgtgctcctgccgtccagccgcagcgacctggcgacgcgcctggtggacctgcgccagggcgcgctcgggcgctgccagtcgttgcaacagcagcaggcggcgcaggcctggaaggacctcgccgactacttcaaccagtacctcgccggacgcttcccgttcgcctacagcctggaagcggccgatgccgagccggggcgggtgcggcacctgctgaaactgatggagacgcgcttgccgcaggtgcgcgaagggctggcccaggttcgctcgccggacctgccggccgccgaggacttcgtccgccgcctggagcaggcgcagcgctggctcggcccgctgttcgagcgcgacaagtcgggcctgctcggcgtcgccctggacatcgactggcgcagcgaccgcagcctggaacgcggcgccgaccaggtgatcgcctggagcctgtactcgggcgaccaggaaagccgtttccccggcgcgcaggacaagggcctgacctggaatgtcggcgatccgctgaaaatcatgctgcgctgggcgaagaacggctcgcagcgtccggcagacgacccgcgccaggccagcctggcggtggccgacctcgaggccggctggagctaccagggctcctgggcgctgttgcgcatgatgcgcgcgcacttctcccggcagcgcccgccgaacgtcgactacacggagtttccgctggtcctgcaactgccggtgtatgcgccctacagcccggaaaacgaggcgcggatgttcctccgcctgtcgttgatgagcctgggcggcaagaccccgctgtccatccagccgctgccggtgcgcgcgccgcaatcgccgttcgcgacgctgttgccggccaccgtcgccagcaccggaggtaccccatgaccctgcctctttccggcaacgccctgtccctggaagtgctgctcgaaccgatcgaccccggacagccgtgcggccccagcctgcgctacgacccggactacgaccgcctgcgcgagttgcgccgggaggacgacagcagcctgccgaccggcgtctggcaagcggaggccaagcgcgccgactgggccgcggtggagcagttggccagcgaactgttgcagcggcgcagcaaggacctgatgctcgccgcctggctcggcgaggcctggctgcaacgcggcgggctgggcggattgcagcgcgcgctggtgctgctggcggaactctgcgagcgctaccccgaggaggtgcatccgcaagcccaggacggcgaccagtcgtggcgggtgccgcccatcgactggctgttgcgccgctatgccgagctgctgcacacgcgcctgccgctgatggggcagggcgcgttcgccgagatcaccctctatgcctggcagaggttgcagcgccagcaggtcgccagcggcgacagcaagagcgccaaggcggcgctggaagcggcgcaacttcagcagaagaagctagacgaagcgttgcgcgcggagcccctggtgcaatggcagcgcaagcaggccagcctgctcgcctgccagcagcaactactgcgcctggaacagtggtgcgaccgctgcctgggcgaactcgcccccagttgccagccattgcgcgaggtcatcgcgcaatggctggccttgctcaaggagttcatcgccatgcacccgcaagcgccgctgtccgaagaacagcccccggtcgcggaggcggatgccagcgaaggcgacgcggacggcgaggaaagcgtcccggcgagcgcgccgagcgggccggctggcgcgccgaccagtcgcgaggacgcctaccggcaattgctgctgatcgctgactacctggcgcgcaccgagccgcacagcccggttccctacctgatcaagcgcgcggtggagtggggcaacaagccgctgagcgagttgctggcggagctgatcaatgcggactcggaggcgcgccgagtctggtcgctgcttggcgtactgccctaatgagcggggttatattttttattcgaatatataaatacgaattcagaattttttaatctatgggttcctggggcaagatgggcgcacattccccggctcggaacccagcatgtccgtcatcacccatccccacgcccgcgagctgaccaaatcggtgcgcgccaccgtgctggtgttcaacgacccccgttcccgcgagctgctggagcgcatcgagcgcctggcgcccagcgaggccaacgcgctggtcatcggcgagaccggcaccggcaaggagctggtggcgcgccatatccacgccctcagcggacgcaacggcggcccgttcgtcgcggtcaactgcggtgctttcgccgagagcctggtggagagcgagctgttcggtcacgagaagggcgcctttaccggtgcgttgcagagcaaggccggctggttcgaggcagccaacggcggcaccctgttcctcgacgagatcggcgacctgccgccgagcatccaggtcaagctgctgcgcgtgctgcaggaacgcgaggtggtgcggctcggttcgcgccggccgatccccatcgacgtgcggctggtggcggcgaccaacgtcgacctggctgacgcggtggtcgccggacacttccgcgaggacctgttctaccgcctgcacgtggcgaccatccaactgccgccgttgcgcgagcgccgcggcgatatcctgccgctggccgagtacttcatcgtcgagcactgccggcgcctcggctacaccagcgcgagcctgagcccggaagccgagcgcaagctgctcgggcattcctgggcgggcaatatccgcgagctggagaacgccatccaccacgcgctgctggtctgccgcaaccgtctgatccagccggccgacctgcacctcatcgacatgcgtgcgcgccaggagccgaacggcttgcgccgcgctcccgaaagcgccgccggctcggcgttggaggcggcgctgcaggcgctgttcgaggaaaaccgcgaggatctctacgagcacatcgaggaaaccgtgttccgtgccgcctatcgcttctgccacggcaaccagttgcagaccggacgcctgctggggatcagccgcaacatcgtgcgcgcccgcctggagaagatcggcgagctggaaacctcgccacggcacaacgtggtctcgctggtgggcaagtgagcgtggcgctttacagtctttcacaattcccccacaaaaccggcaagaacccggacggcggctgttctacaacggagcggtgaatctcgttggccggaccagggacgtcgccatgcctcgctccgctcgcctgtgtcgctcgctcccggtagccgctttcccggcggcgccgagtccgcctggtcctccagtcacagcaaccttggtttcccgacccggcgaagaggatcgctgcatgccgtactgttcgccggaacaactcgccgacctaggcccgctgctggattgcctgcgccgctggccgcgcatccgcgagccgcggccgggggtgttctacctgggcgaccagccgttctgccagttccattcgcgcaatggccagcgctgggccgacgtcaagcgccgcaaggggcgcctgccgccgttcgttctgccgccgggcgaccagcattcggcgcgggcattccagatattcctgctccaggcctacaagctgaactgaactgttgcccgggcaacagtcggacagcagcgctgttgcgtggctgacaggccgaggccggaaacccgccgcaactgcccggaaaacgcacatttccccgttggtacggcccttgctccagggcactgcacctagcgcaacagtccacagggaaatcccatgaccagccccttcaaagtcgtcgccgtctccggcggcacctatcgcccgtcccgcaccctggtactcacccaggccctgatcgccgagcttggccagtcgttgccgatcgacagccgggtcatcgagctgaccgacatcgccgcgccgctgggcgctaccctggcgcgcaaccaggcgccggcggaactgcaggcggtgctcgacgagatcgaaagcgccgacctgctgctggtcgcctcgccggtctaccgtggctcctatccgggcctgctcaagcacctgttcgacctgatcgacctcaacgccttgatcgacaccccggtgctgctcgccgccactggcggcaccgagcgccacgcgctggtcctcgaccaccagttgcgcccgctgttcagcttcttccaggcgatcaccctgcccatcggggtctacgccagcgaggccgacttcgacaactaccggatcgtcagcgagccgctgaaggcgcgcatccgcctcgccgccgagcgcgccgcgccgctgttcggcggacgctccgaactgttgaagatcgcctgaggtgcgccgatgaacgtgttctggttcctcccgacccacggcgatggccacttcctcggcaccagccagggcgcgcggccggtctcgctgccttacctgaagcaggtggcacaggcggccgacagccttggctatcacggcgtgctgatccccaccggacgctcctgcgaggactcctgggtggtggcctcggcgctggcgccgctgaccgagcgcctgcgcttcctggtggcgatccgtccgggaatcgtttcgccgaccgtctcggcgcggatggcggcgaccctcgaccgcctgtccggcgggcgcctgctgatcaacgtggtcaccggcggcgatcccgacgagaaccgcggcgacggcatccatctcggccacgccgagcgctacgaggtcaccgacgagttccttcgggtctggcggcgcgtcctgcagggcgaggcggtggacttccacggcaagcacatccacgtggagaacgccaaggcgctctatccgccgctgcaacggccgtatccgccgctgtacttcggcggttcctcggaggccgcccacgaactggccggcgaacaggtggacgtctacctgacctggggcgagccgttgccggcggtggcggcgaaaatcgccgacgtgcgccagcgagcggctcgccatgggcgtacggtgaagttcggcatccgcctgcatgtgatcgtccgcgaaaccgccgaagaagcctggcgcgccgcggacaggctgatcgaacacatctccgacgagaccatcgccgccgcgcagcagtccttcgcccgtttcgactccgaaggccagcgacgcatggccgcgctgcacggcggccgccgcgatcgcctggagatccagccgaacctctgggccggggtcggcctggtgcgcggcggcgccggcaccgcgctggtcggcgatccgcggcaggtggcggagcgcatcggggaatacgccgagctcggcatcgacagcttcatcttctccggctatccgcacctggaagaggcctaccgcttcgccgaactggtcttcccgctgctgcccgaaccctacgccagcctggccggccgtgggctgaccaacctgaccgggccgttcggcgaaatgatcgccaacgacgtgctgccggctcgcgccggcgcttgagcagccgggcccccgaggagaaaccccctgtgaatgcgaagacccgccccgaggcgcaaacgccgttgcagatcgcccggcgcctggccgccgatttcgccgagaacgccgccgagcgcgacgtcgccggcggtaccccgaaggccgagcgcgacgcgttgcgccgcagcggcctgttgtcgctgatcatcccgcgcgaatacggcggcctgggggcgagctggagcgaaaccctgcaaaccgtgcgcgaactggcccgggtcgacagctcgatcgcccacgtctatggcttccagcacctgatgctggccaccgtgcgcctgttctcgcggcccgagcaatggcagccgtggttcgagctgaccgcgcgcaaccgctggttctggggcaacgcgctgaacccgctggacaaccgtaccgtggcccggcgcttcgacggctggcgcgagttctccgggaagaagagcttctgctccggcgcccgcgattcggagatgctcatcgcctcggcactggacggcgagggcggggcgctgctgattgccgccatccccaccgcgcgcagcggtatcagcctgggccaggattgggacaacatgggccagcggcagaccgacagcggcagcgcgatcttcgagcgggtgcgggtggaggagagcgagttgctgctcgatcccgggccgctgagcacgccgttcgcctgcctgcggccgctgatcgcccagttgatcttcaccgaggtgttcctcggcatcgccgaaggcgccttcgaggaggctcgccagtacaccctgcgcgaagcgcgaccgtggttccgctccgaggtcgccgaggccaatgccgacccctatgtgctggcgcgctacggcgaattctgggtcggcctggaaagcacccgggcgctggtcgagcgcgccgcgcagcgcctcgacgccgcctggtccaagggcccggcgctggacgccagcgagcgcggccagttggccctggccatcgccgccgccaaggtcgccgcgacgcgcaacggcctcgacctgtgcaaccgcatgttcgaagtcaccggcgcccgctccactcacgccgccctgcgcctggaccgctactggcgcaacctgcgcacccagaccctgcacgacccgctggactacaagatccgcgagctgggcgactgggcgctgaaccagtcaccgccgcaaccgaccttctactcatgaacgcttctacccatactcccgaccggctgctgacgctgccacgttcgccgaacctggcgacctcgatccgcgccaccgcccaggtcttcgaggatccgaagtcccaggccctgctcgaacacctgcgccaggtggcgccgagcgaggccagcgtgctggtgatcggcgagaccggcaccggcaaggaactggtggcgcggcatatccacaacctcagcgcgcggcgcaccggtccgttcgtggcggtcaactgcggggccttctccgagtcactggtggaagccgagctgttcggccacgagaagggcgccttcaccggcgccctggcggccaaggccggctggttcgaggaggccaacggcggcaccctgttcctcgacgagatcggcgacctgccgatgccgatccaggtcaagttgctgcgcgtgttgcaggagcgcgaggtggtgcgcctggggtcgcgcaagagcatccccatcgacgtgcgcgtgctggcggcgaccaacgtgcaactggagcgggcgatcaatgccgggcacttccgcgaggacctgtactaccggctcaatgtcgtcagtctcgaactgtcgccgttgcgcgagcgacccggcgacatcctgccgctgacccgccacttcatcgccgaatacagccgtcgcctgggctacggccagagccagttgagcccggaggcggcgcagaagttgcgtgcctattcctggccggggaacatccgcgagctggagaacgtcatccaccataccttgctgatctgccgcgacgggctgatccgcgcggatgacctgcacctgtccaacctgcgcctggagcgtggcgaggagctagcgcgcgggggcccggcgagcggcgccgccgagcacttgttgcagcaggctttccagcgtctgttcgaagagcagggcgagaacctccatgggcgggtcgaagatgccctgctgcgcgcggcgtaccgtttctgccacggcaaccaggtgcataccgccaacctgctgggactcagccgcaacgtcacgcgcacgcggctgatcgccatcggcgaactggtggtgaacaagcgcggtggccagcggatcgatggcgagcgggcggtgcggttgtcgatctgagttcaggcgctcgggatcgcggcgggtaagcgcaagcggttattcggccaacctcccgcgactatccgccgtgccggcgctgcggcattcgcccaaacccagccgggcgcagtagactcggcgctttgcggagcgtctggctccgcgctctgcgccaggtggaactgcccgatgcccgatacctctcccgatctgccggccatgtcgccgctcgccgtctatcgccaggccgtggaacagcgcggtttcgctcccgacgaggcgcagcggcgcgccgccgaggcgctggagcgttgtttccaggccctgcatgaagctcaccgccacggcgcgatccagggcgtctacctgtggggaccggtaggacgcggcaagacctggctgatggatcacttctaccagtgcctgcgcgtgcccgcgcggcgccagcacttccaccacttcatgcaatgggtgcaccagcgccagttcgaactgaccggtacagccgacccgttgcgcgccctggcccgcgagttggcgcgggacgtgcgggtgctgtgcttcgacgagctgttcgtcagcgatatcggcgatgccatcctgctcggcagcctgctgcgcatcatgttcgaggagggcgtggtgctggtggccacttccaaccagccaccggagcagttgtacgccgacggtttcaaccgcgaacgcttcctcccggcgatcgaggcgatccagcggcacatggcggtggtcgcggtggatggcggccaggaccaccgcctgcatcccggccgggccgagcaacgctactgggtggtggaggcggggcaggcgagcggtttcgccgaactcttcgcgcgcctgagtgccggcgaagcggcatccacgcagcccttcgaactggggcaccgcccgctggcggtgcaccggcacagcgaatcggtgctctggtgcagctatgcgcagctctgcgaggcgccgctgtcggcactggacttcatcggcctttgcgaccgctaccgggcgatcctgatggacgacctgccgtgcctgagcgccagccagcgcgaaggccgcatagcccgtggcaccgaggacggcgcgcaactggtggaggcgggggatcgcgaattgccgcagttgtcggtgcacgacgacggcgtgcggcgcttcatcgccctggtggacgaatgctacgaccgcaaggtgccgctctacctggaggccagggtgccgttggaggcactttataccgagggctacctggccttcgccttccgtcgcaccctcagccggctgcgcgagatgcagctggcacgcttcggcagcgacagcgccggctagcgccgcgccgccgaagcgggaactgcggatggccgcccgcgctcatccgccggccaggccgaggctcagtagccgtgccggcgcagcagcgcgtccatgtcttgcgccgccgggcggccctggaacttcagcagttccgaggtgcggttggtgaagaaaccgtcgacgccggccgcgcctagggccttgaagtcttccgccgagtccaccgagtaggcatggatgaacaacccgcgcgcgtgggtcatgcggttcatccagggtttcaccaggtcggcgtagctctgttcgccgcgttcgctgagggtcgccgagggcccggtgcccagcgcgccgtgggccttggcccagtccagccaggcgccgaactcggcttcggacttcacttcctgcctggcgtagaaggccgccttgtcggtttccccggattccttgaaggtcactggcgaacgggcttccaggtaaccgtcgccgagccacagcaggagaatcttcggcacttgcggcatgctttcttgcagcagctccaggctgctcttctcgaaggtctgcaggatcacccggccattgccgtgggccacgtcgacatgcccggcggcggcgcgctcgcggggttgcagccagccgcggcgttccagcagcttgcgcaggtcgtcttcgatgccggggaattgcgccggtaccttggtctccaggtacaggcccggcttgttggcgccgccctcggcgatgtcgagcatctcgtcgagggtgaggatgcgcaggccgacgaagccgggccgggcgcgctcggggaaggcgcgattgaaccaggagccggcgtccaggcgcttgagttcggcgagagtgaagctgctcaccgggtccttggcgcgctccgggaagacctcggcgacgtcggtggtgcgctccagggtgtcgtcgtggagggcgaccagcacgccgtcgcggctgcgctgcacgtcggcttccaggtagtcggcgccgaggtcgcgggccagcaggtaggccgcggcggtttcctcgggggcgtcgtacgaggcgccgcggtgggcgatgaccgccggccagggcacgccggcggcggcgctgagggccttgccggacggctccgcggcctgggcggcgagccccgccgtcaggccgaggaggcccagggtcttgaatgttccttgccagaatctttgccgcatgaggcgcctttccttctttctttttcacgggattgccgaccagtctggcgtcgccggatgaccggaggacgacagatacaggtctgtccggcgcggggaaagatgcgctgtcgcggcgacgctggttcctgtcgccctcggcaaagcgccagccctcccaggccgggagggcggattctacaggcgtttgttcagcaggcgggccaggcggtcgccgccgaactggatcaacgtgaccagcagcacaaggacgatgatcacggtgagcatcacctgggtgtcgaagcgctggtagccgtagcggtaggccaggtcgcccaggccgccggcaccgatcgcgccggccatggccgaggaattgatcatggtcaccagggtgatggtgaagccgccgacgatgcccggtcgcgcctccggcaacagtacgttgcagatgatgtggcggcgttcgcagcccatcgcctgggccgcctccaccaggccgtggtcgacttcgcgcaggctgacctcggcgatccgcgcgaagaacggcgtggcggcgatggtcagcggcaccaccgcggcccagactccatagctggtgccgacgatcatccgggtaaagggaatcagcgccaccatcaggatcaggaagggtaccgagcgcagcacgttgaccagaccgcccaggatgcgattgagcaggcgcgcctcgaagatcccgcccggcccggtggtgaccagcaccagggccagcgggatacccaccagcaggacgatggcggaggacgcgccgatcatcagcagcgtatcgaggaaaccttgccagagccgttcaagcatgggcgacatggccgagcacctccaccttgtccgccaccagcgcggccttggccagcacgccgggaagctcgccgggcggcgcgccgacctgtagcagcaggcgccccagggcgcggccctggatacgctctatgccgccgtggagcaggtcgacgcgctggccgatggccctggcgatggccagcaggtccggtacccgtcggctggcgccggtgtactggagatcgagcagcaccgggtcgccggcgccgggagcctggcgcaggcgcgcctggaggtcggccgggagggcggcgcgcaggctgccgagcaggcttcgggtgacggcatggcgcggatcgccgaagacttcccagacttcgccctgttcgacgatgcggccgcattcgaggaccaccacgcggtcgcagatctcgcggatgaccgccatctcgtgggtgatcaggacgatggtcaggcccagccggcggttgatgtcgcgcagcagcgcgaggatcgcctgggtgctctccgggtccagcgccgaggtggcttcgtcgcagagcagtatctgcggctggtgcaccagcgcgcgggcgatgccgacgcgctgtttctgcccgccggagagctgtgccggataggcgtcgcgtttttcctccaggccgaccagttgcagcagcccggcgacccgctcctcgatccgtgcccggggcaccccggccacccgcagcggcagggcgatgttctgccgcacggtcttggccgacatcaggttgaagtgctggaagatcatgccgatgcgtcggcgcagggcgaccaggcgctggccgtcgtagccgccgatgtcttcgtcgtcgatcagcacctgcccctcgctgggacgctccaggcgattgagggtgcggatcagcgaggactttccggcgccgctgcggccgatgatgccgaacacttcgccgcggcggatttccaggtcgatctcccgcagggcctggactccaccggggtagcgcttgcccaggccgtggagacggatgtgcggcgtggaggcgcgcgtgtcgggcgccgtcgggaacggttcgaggggcagcaggctcgggggaacggtcatggccgtcactcccagcccggctggtacagcgtgccatgggccttgtccagcgcggcgcggaccaccggtgaatgctggtagatgtcgacgaagcgcgccaggcggccgtcgcggtcctggtagtcgccgcgggtgacgaactggatcacgtattcccggttgtcgatcccgtcgaacagcagtgcccgggtcgggtcgatggtcccggccaggcgcaggtagtgcgggtagccctgggccaggtcgaaatcgtcgagggcgcgcgccagttgcaccgcctccagctcggtgatgcggatgtccttcgggttgtcgacgatatcgtcgagggtcgccttgtagccgacgccgtccctgagcttcagcaggccggccttctgtagcagttgcaggccgcggccgccattgatcgggtcgttggcgatggccacgctggcgccttccggcaactctgcgaggctggcgtagcgcttcgaatagagcccgacgttgttgatgatccccggcgcgaacggcttcaactggaagccgccttcgcggttggcgttttccaggaagggcacgtgctggaagtagttggcgtcgatgtcgccctgggcgagggtgatgttgggggcgttccagtcgctgaactcgaccagttcgaccttcagtccctgcttgccggcttcgctcacggcgacttccagcggcggggcgaaggcggcggtggtgccgatcttcagcggggcgtcggcggcctgggccgggccgctgccgaggaggacggccaggctcagggttttcagggtgttcagcatggtgggctcctgaacgaaagggaaagtggggtcaggcctggcgctggcgtgcggccgggggctggcggaaggcggcgccggcgtgttccgcctgcaggcgcgcgcggccgccgccgaagagcttctcccgcagggtgccgggggcataggcggtcttgtagctgccgcgtgcctgcaactcgggcaccaccaggtcgatgaagtcggcgtagctctccggctccacggtgcgggtcaggttgaagccgtccaggccggtatcggcgatccagccttcgaggtcgtcggcgacctggcgcgggtcgcctaccagggtcacgtagcggccgcccagggccaactggtcgaggagcttgcgcacggtggagtcggtgcgcgccacggtgaggttcttcaccaccgactcgatggcgttgttcttctcgtagcggatcggctcgtcgagtccgtagcgcgacaggtcgatgccgctggagctggcgaagtgcgccaggccggcctcggggctggcgtagcggcggtactcggcatgcttgtcgcgggcctcggccgcggtggcggcgacgatcacgttgatgcccatgaagatcctgatgtcctcggcgcgacggccggcgccgaccaccgccgcgcggatgcgctgcaccagctggcgggtggcctcgcgggtctgtccggagacgaacacgcattcggcgtggcgcgcggcgaaggccaggccacgctccgaggagccggcctggaacagcaccggggtgcgctgtggagagggctcggcgaggtggtagccctcgacctggtagaactcgccatggtggcggatcttgtggatcttctccggccgcgcgtagacccgtcgctggcggtcggcgagcaccgcgtcgtcttcccagctgccctcccagagcttgtagaggacctccaggtactcgtcggcgcggtcgtagcggcggtcgtgctcgatctgcgcggactggcccatggccttggccgcgctttccaggtagccggtgacgatgttccagccgatccgcccgtcgctcaggtggtcgagggtcgagagccgccgggcgaacgggtagggcgcctcgtaggtgaggttggcggtgacgccgaaacccaggtgctcggtgaccccggccatggccgagaccagcatcagcgggtcgttcaccggcaactggacggcttcgcgggcggtcacctcgatgccgccctggtagacgtcgtagacgccgaggatatcggcgatgaacaggccgtcgaacaggccgcgctccagcagccgggccagctcggtccagtggcgcagtttgcggtagtcgctggagcggtcgcgcgggtgggtccagaggccgtggttgatatggccgacgcaattcatgctgaaggcgtttaggagaatctgcttcttgctcatggcggttccttcggcgttcagagcgtgccgcggcgtggcggcaggcggccgttgaggtagtagtcgccgaccgcgtggtacttccagcgcaccgggtcgtgcagggtgtgtacgcgggcgttgcgccagtggcggtcgagaccgagttcggcgagacaggcgcggctgccgccaagctcgatcagcttgctgccggccagcagggcgacctcggtggtcagcgcgcgggcttcggcgacggcgatcgaggcggccgccacgctttccgcgtccggctcggcggtggcccggtcgagcacccgcccggcacgctccagcagcgcttcggcggcgtgcaggcggatcgccaggcggccgatctcatggatggtcagtgggtcggcgctggccttgtcgacgccggagtcgacccagggccgggcgcgctcgcggacgaaacgcagggtgtcctcgaaggcgccgcgggcgatcccggcgtcgatcgccgcgtggaggatctgcgccagcgggccgacggtggtcgggcgctcgaaggcgtcctggaacgagaccacgtcctcggcggccaccgctacccggtcgaacagcgccgaaccgctgccggtggtgcgttgaccgaagccggaccagtcgtcgacgatttccagcccggcgctgtcgcgcgggacgaaggccagttgctggcggccctcgtcgtccaccgccagggtcggcacccgctgcgcgtagagtgcgccggtgcagtagaacttgcgcccgtccaggcggtagccgtcgccgtcggcgcgcaggcgggtacggcgctcgctggcggtacgcgtgccgatctcggccagggcgttgccgaaacgctcgccggccagggcggcgccgaacaggcgacctttctgcgccggcgagccgttcacccgcagcacttcgagggcgtagaaatggttctgcggaatctgccccagggaactgtcggcggcgctgacgatcgccaccaccttcgccagggtcacccgcgagacgccggccccgccgtattcgcggggcaccgcgatgccccacaggccggagcgggagaacagttccagttcttccagcggcaggcgccgctcgcggtcgcgctggatgctttcgcgggcgaacagggcggccagctcgcgggccgtttccagggcttcgtcgtcgctgccgatgcgatgggcagcggccgtgggattgtcgcgcgtagcgtgtgcgaggctcatcgggcgctcctcagatccatgagtgacgcgccggacgggcgccgttcaggtagtagtcgccgaccgcgtggactttccagcgcaccgggtcgtgcagggtatgggtgcgggcgttgcgccagtgccggtcgaggttgaactcggcgagcgtggcacggctgccggccagctcgaagagcttctcgctggcggccaggctgatctcggtgctcagcaccttggcctcggccacggcgatcgaggcgcgtgccgccgactcggcgtccaccggccgcgcggccacttcgtcgaggacctggccggccttctccagcagggcgttggcggcgtgcagctcgatttgcaggcggccgacctcggcgatgctgtagagctcatcgctggcgcgttcgacctgggcgtcgatccagggccggctgcgttcgcggacgaaagcctgggcgtcgtccagcgccgcctgggcgatgccggcgtcgatggcggcctggatcagttgcgagacggcgccctggaggctcgggatctcggccagcaggccgttgtggatcagcatgtcgccggctaccggaacctcgtccagcagtaccgtgccgctggcggtggtgcgctggccgaagccggaccagtcgtcgacgatgcgcaggccgggagcgccgcgctcgacgaagagcatcaccgcgcgctcctcctcgtcgatggccttgaccgccacccaatgggcgaacaaggctccggtggagtagaacttctcgccgctgacccggtagccgtcgccgtcgcgacggacccgcgccttcagctccagggtgtggcgggtattgcgctccgggccggcgttggccagccggcggccgtcgaggatgccacggaacagcttgcgtttctgcgccgggctggcgacgttgtcgatcacgctgagcaggccgaactggttctgcggaatctgtccgagggccgggtcggcggcacagatgacacggaacacctcggccagggtcacatgggaaacctgcgcgccgccatgggcgcggggaatgccgatgccgcccaggccgaggcgggtgaagagttccagttcctgccagggcaggcgtcgttcgcggtcgcgtagcgccgcttcgcgacgggccagtccggctacctcgtgggcggcctgcaacgcctgggcgtcgttctcgatgaggcgtgccgggagtagccggggcgcctggtcacgaagatccttgggtgcggtttcgtcggtcatggttcagccttgcagcgtggtggttccgccagcggcatcggtgtggcgcggctcgcgggttcggtggtgcgggtggaacgcctggaggagggaggggaaacaggcggtaacgacatgctcgctgggcacctctggcagttcggataggtggctggcgcgatcgccaagcctctgccgggtctgtttgcacaagccgtgccgtttgctaatccatagaaaaatcaaagagttggaggttttctccaacagtttctgctggtccgcgggcgctgcctgttgctccgctgttgccagggcaacagttaccggcggattacagccggatgccgcgcgccagcgccgtgctgctagggtgatagggtttcgcgcgcggcggcctggcgcgcgcccacccactcggatcgtcgaaggaactcccatgcagagcgctaacgcttcagaactcaccaccgacatcgccgtgatcggcggcggcgcggccggcatcggcgtgatcgccagcctgctgaaacgttcgccggggttgcgtatcagcctgatcgagccggcggacacccactactaccaaccgggctggaccctggtcggtggcggcgcctacgcacagggcgacaccgcgcggccgatggccgggctggtcccgcccggcgtggagtggttgcgcacccgcgtcgagcgggtcgaccccgaggcgcgccgactgttgctggagggcggcgacagcctggaataccgcaacctgatcgtctgccccggcctgcgcctggcctgggagcgcatcgagggcctggaggagaccctggggcgcaacggcgtcacctccaactaccgctacgacctggcgccctacacctgggagctggtgcgcggcctgcgcggcggcaaggcgctgttcacccagccggcgatgccgatcaagtgcgccggggcgccgcagaaggccatgtacctgtcctgcgaccactggctgcgggagggcgtgctgcaggacatcgaggtcgagttcgacctggccggcgcggcgttgttcggtgtcgccgatttcgttccgccgctgatggagtacgtgcgcaagtattcggccgagctggcgttcaattccaacctggtgaaggtcgacggcgcggcgcgcaaggcctggttcgaggtgaaggacgccgacggcaacaccaatctggcggaaaaggacttcgacctgctgcacgtggtgccgccgcagctgccgccgaccttcgtcgccgccagcggcctgggcgacgcggccggctggtgcgaagtcgacccggcgaccctgcaacatgtccgtcatggcgagattttcgccctcggcgatgtctgcggcaccgccaacgcgaagaccgcggcggcggcgcgcaagcagatcgtggtggtggccgagaaccttctcggcctgcgcagcggccgtggcctgccgctgcgctacgacggctacggcggttgtccgctgaccgtcgagcgcggccgggtggtgctggcggagttcggctatgccggcaagctgctgccgaccttcccgctggagcccaccgcggccagccgcttcgcctggctgctcaagcgccacgtactgccctgggtgtactggaacgccatgctcaagggccgggagtggctggcgcggccggggcgctagaccgggcggcagccctcggcctgaccctccgcacggccggcctcaaagctcgtgggcgaacggcaggtccggccccacccgcgagcaggtgaccgccgccgcgcggatggcgaaggcgagcatcgcgtcgatcgcttcccgcgacagcgcggctagcccggccgggctgtcggcgtcgaggcggcggaggtaggcgagggtcgccgcctggaaggtatcgccggcgccgaccgtatcgcgcagtggcagggcggtatccgccgggcgactccagctgccgtgggtgcagtgcacgctggcgccggccccgccgtgggtgacgaagaccagccggcagcgcgggttcagccagccgcgggccacctcgccggggtcgcgcccggggtagagcagggccaggtcttcctcgctggccttgatcaggtgcgcatgactggcgaaggcctcgacccggcgccgccagaggtcgatgtccggctgcgggtcgaggcgcacgttgggatccaggctgaccaggcgccggccgctctcgcgccggaccagcgccagcagggtgtcggccaccggtgtcaccaccagggtataggagccgacgtgcagcccgcgtatccgcccatccagcgtcggcaggtgttccaggcgcacctggcggtcggcgcagccgtcgccgcggaactggtattgcgccgagccgctggcgtcgaggccgaccatcgccagggtggtcggggcgtcgctgggcaccaggaagccgcagtccacgccttcttcttcgagcacccggcgcagccgcgtgcccaggtagtcgctggacagcccgccgaacagcgccgcctccacgcccagccggcgcaggccgacggcgacgttgaacggcgagccgccggcgatcgcggtgaagcccagctcgttgctgcgcgcagcgctttccaggctgaagacatcgaaaagggcctcgccacacaccaggtacatgcagatctccaaaacgccagaagaggaaggaaagcgaccattatcgcggaggcaggtgctccaggtaacgccggtaggcctgttcgtaggccgcctgttgtcgcgcctggggctgggtgcgggtcgactcgtcgagcgccacgcagcgacggcacagggcttccaggctttcaccggcgccgctttcgcggcccaggctccaggccgcctggagcgccgcgccaagggcggcggcctcggtctgccgcggacagaccagcggcaggccgagcaggtcggcgagcgtccgccgccacagcgggttcttcgccgcgccgccgaccaggcggatttcctcgcccggcaggccgctggcgcgcagcaggtcgaggccgtagcgcaggccgaaggcggtgccttcgagcaccgcccggcaaagattggcgcggctcaggttggccgcggtcatgccatgcaggctggcgctggcatgcggtagcgccggaacccgctcgccgtcgaagaacggcagcatcagcagaccctcggcgccgaccggcgcctgggcggccagccgggagaattcgtcgaggtcgaggtgcagcaggtcctgtaccaggccgcaggcgccggtgaggttcatcgtgcaggccagcggcagccagccgccggacgaggcgcagaaggtcgccagctcgccgtgcggactgaccagcggccgctcggcataggcgctcagggtgccggaggtgcccaggctggcggtgagcaggccggggcggatgttgccggtgccgatggcggcgagcatgttgtcgccgccgccgccggcgacccgcgtgtggggagccaggccgagggcggcggccgcttcggggcgcaggttgccgatgcaggcgccgggctcgatcagctccggcagcgccgccgccaggcgtccgcccggctcgaccagctccagcacgtcgctggcccaggtgcgccggcgcacgtcgaagtagccgctgccggaggcgtcgcccgcttcgctgcagacgcggccggtgagccagtggttgaggtagtcgtggggcaggaggatgtgcgcgacgcgggcgaacagctcgggaaagcggcgcctgctccagagcagcttggacagcgtgtagcccggcgcgagcaccagtcccaggcgttccagcgagccggccgggccgccgagggcttccagcagctcgcggttctccgccgcgctctcggtgtcgcaccagagcttggccgggcgcagcgcccggccctcggcgtcgagcaggagcagcccatgctgctgggcggaaaccgccagggcgcggacctcgcggccgtccaccgcggcttcttccagggccatgcgtaccgcgctggccatggcttccagccagtccgccgggtcctgctcgcggcgtccgtcgcggccttccggcgggcgctgcgcggcgctgcccaggcccagcgtgcggccgctgccggcgtcgagcagcagcgccttgctgccttgggtgccgcaatcgatgccgaggaacaatccgtgcatgcggccctccggagtcattcgccgagtacctggcgcagggtttcgctgacgccgtgtcggcgcaggctgtcgtagagccgctcgaaggcctcgacgaaggccgccgaggccgggatcgccgggccgaacacggtctccacgccgagcaggcgccggcccaggccgtggcgttcggcaaccagcgcctggcattcggcggcgcgcggatcgggaatcgggtagcgttcgccatgctcgtcgaccccgcccaggtacagcgcccaggccgccaccaccagggccacccgttccagcggccggccggcggcgatcagccgattggcggtggggacgatgaacttgggaaacttcgacgagccgtccgagcagacccgttccagttggtcggcgatggcgcggttggcgaagcgctcgaccaggctgtccttgtagcgttccaggtcgatccccggtaccggtgccagcagcggggccacgtcgcggtccatgaaggcccgcacgtagcggcgcagcagcgggtcgccgagggtctcgtggacgaagcggtagccgcgcaggaagcccaggtaggtgagcgccaggtggctgccgttgagcaggccgatcttcatctcctcgtagggcgtgacgtcgtcggtgaactgcacgccgaccttttcccaggccgggcgcccagcgctgaaacgatcttccagcacccattgcacgaagggttcgcagaccaccggccaggcgtcttccacgtcgtgccgttgggccagttggcggcggtgggcggggctggtcatcggggtgatgcggtcgaccatggcgttgggaaagctgacgtgcgtcgcgatccagcgcgccagccccgggtcgagccgttcggcgaaggccagcagcgccttgcgcgccacctcgccgttatgcgggaggttgtcgcaggacatcacggtgaacgccggcacgcctgtgtcgcggcgccgccgcagagcctcgcagagaaagccgaagaccccgcgcggggtccgcgggttggccaggtcgtggcgcaccagcggcaactcggcgaggaactcgccgctgccatcgtcgatgcagtagccgccttcggtgatggtcagcgagacgatgcggatggccggctcggcaagtttttccagcagcgcctcggcgccgtcctcggcgagcagcatgccgctgatggcgccgatcacgcggacctcggtgtccggttggtcgcccagctcgtagagggtgtagaggtagtcctgggcggccagggcgtcgtgcatggcgcggtcgtcgctgcgcaggccggcgccgcagatcgcccagtcgagggcttcgccgcggttcatcagggcgtcggtgtaggccgcctggtgcgcgcggtggaagccgccgacgccgatgtggacgatgccctggcgcagttgcgcggggtcgtaggacgggcgggcgacagcggtcgccagcagggggaggtgctgccggttgagtttcatcggtgggttcccgctggcggcttcaggccgcctgttgcagtcgtttgtcgagggcctggccgttgctgtcgaacaggtggcagtgcgccggatcgaagcccagctccaggggggcgccgtagtccggtgcgaaatcgccgcgcacgcgcagggtgagcatttcccccgagtcggcgcggacatggcagaagctgtcgctgcccaggcgttcgctgacgtcggcggcgacccgcagcaggccctggaaggcatggcccgggcgggcgatgttcaggtgttccgggcggatgccgagggtcaccgggctgccggtggccagctcgccggcgcatagcggcaggccgacgcgcgcgccgcattcgagggcgacctcgcagcgctcgccctggttgcggctgagatggccgcgcaggaagcccatcttcggcgtgccgaggaagccggcgacgaacaggttggccggatggtggtaaagctccagcggcgagccgacctgctcgacgcgcccgccgttgagcaccacgaccttgtccgccagggtcatcgcctcgacctggtcatgggtcacgtagatcatggtcgccgccagttcctggtgcagccgcgccagttccaggcgcatctgcacgcgcagggcggcgtcgaggttggacagcggttcgtcgaagaggaatatcttcgggttgcgcacgatcgcccggccgatcgccacccgctgccgctggccgccggagagctggcgcggcttgcgctccagcagcgcttgcagttcgaggatgcgtgcggcggcgtcgaccttggcggcgacctcgcgcttgtcgacgccggccaggtcgagggcgaaggagaggttcctgcgcaccgtcatgtgcgggtacagcgcgtaggtctggaagaccatcgccaggtcgcgtttcgccggcggggtgtcggtgatgtccgtgccgtcgagggcgatgctgccgccgctggcctcttcgaggccggcgatcaggcgcagcagggtcgacttgccgcagccggaggggccgacgaagactacgaactcgcggtcgcggacgtcgaggtcgatgcccttgatgatggcctggccgtcgaagcctttctgcaggttgcggatcttgagatcagccatggcggaatacctccgtggacgaaaggatggggatgcgcttcatttcacggcgccgaaggaaaggccgcgtaccagctgcttctggctgatccagccgaagaccaggatcggcgcgcaggcgagggtggagacggccgagagcttggcccagaacagtccttcggggctggaataggaggcgaccagggcggtcagcggggcggcggccgaggaggtcaggttgagcgaccagaaggcctcgttccaacacaggatcagcgacagcagcagggtcgaggcgagcccgccgcgggcgatcggcagcagtacgcggacgatctcctgccaggtgccggcgccgtccaggcgcgctgcttcgaggatgtccacggggatgtccttgaagtaggtgtacaccatccagaccacgatcggcaggttgatcagggtgtagacgatgatcagcgccagccgcgaatcgagcaggccgaactgcttggccagcaggtagatcggcatcagtacgccgaccggcggaagcatcttggtcgacagcatccagagcagcgtgcgcttggtgtggcgggtctcgaagaaggccatggagtaggccgccggcaccgcgacgagcatgcacaggagagtcgccgaggaggagatcagcaacgagttccaggcgtaggcgaagtagtcgctgcgctcgttgatgtgcaggtagttctccagggtcggctggaagatgaactgcggcggcgtggcgaaggcgtcgatctcgctcttgaagctggtcagcagcatccagaagatcgggaagaacagcagcagggcgatgccccagcagagcaggccgagcagggcattgcgcaggcggcgggattgcttgagtgtcagcatggcgggttcctcagctgcgctcggtaaggttcttgccgatcatccgcaccagcacgatggcggcgatattggcgatcagcaccgcgatcaggcccccggccgaggccatgccgacatcgaactgcagcagcgcctggttgtagatcaggtaggcgaggttggtcgattcgtagccggggccgccgctggtggtggtgaagatctcggcgaacaccgagagcaggaagatcgtctcgatcatcagcaccaccgcgatgggccgcgccaggtgcggcagggtcaggtgccagaagatcgccagcggaccggcgccgtcgaggcgggcagcctccttctgctcctggtcgagggactgcatggcggtcatcaggatcaggatggcgaagggcagccattgccaggagacgatgaggatgatcgacagcagcggatagtgcgccagccaatccaccggctcggcgccgaacaggcgccagacggcggcgaggatgcccgagaccgggtggaagatcaggttcttccagagcagcgcgctcaccgtcggcatgatgaagaacggcgagatcagcaacacccgcaccgcgccgcggccgaagaattcgccggcctccagcagcgcggcgatgagcacgccgaacgccacgctgatcgccagcacgctgcccaccagcagcagggtgttcagcgcgccgggcaggaagccggcgtcggtgacgaagaaggtgaagttctccacgccgacgaaggcattctcgccgggatacagcaggttgtagcggatcagcgagaaatacagggtcatgcccaggggcacgatcatccacaacagcagcagcgccaccgaggggctgaccaggagccagccagggccgcgccggcggcgctggagacggcggcgggcgggacgggccgggagcggggtatcgagggccgaggtgttcatggcgactccgtctggatcttcaaggacaagcgctcgagcagcgccgcgccgggcgcggctgcgcccggcggcggactacttcggatagccggcgcgcttcatctcgcgggcggtgctctgctgcgcggcggcgagcgcctggtcgctgctcatctgcccggtgagggcggcggagaacagcttgccgacctgggtgccgatggcctggaactcggggatggtgaccaactggatgccgacatagggcaccggcttcagcgtcggatggttgggatcgacgcgcttcagcgattccagggtgacccgtgcgaacggcgcggcggccaggtaggcctcgctgtaggtcgaggcgcgggtgccgggcggcacgttggccacgccttccctgtccgccaccagcttgccgtacgcctgcgaggtggcccaggtggcgaaggccttcgccacgtccttggcgcgcgagctggcgggaatcgccagggcccaggaatacagccaggaggcgcccttgtcggtgacttcccggggggcgaaggcgaagccggtggcgtcggcgaccttgctctggctcttgtcggtgacgaacgaaccggcgacgctggcgtccacccagatcgcgcacttgccgctgttgaacagcgccaggttctcgttgaatccgttgctggaggcgccgggcgggccgtaccgcttgagggtggagacatagaagtcgagagccttcttccattcgccgccgctgaattcgggctgccatcgctcgtcgaaccagcgtgcgccgaaggcgttggccagggtgccgatcaacgccatgttctcgccccagccggccttgccgcgcaggcagatgccgtactggccctgatccgggcggttgagcctggcggcgaattcgccgagctgggtccaggtcggttgctcgggcatccgcagcccggcctgctggaacaggtccttgcggtagtaggtgatcgaggcttcggcgtagaacggcagggcgtacagcgtgcccttgacggagagaccgtcgcgcaccgagggcaacaggtcgtccagggcgtagtcggcgggcagcccgctcatcggctccagccagcccttggcgccccacagcgcggcttcgtacatgccgatggtgagcaggtcgaactgtccgccctgggtggcgatgtcggtggtcaggcgctggcgcaggacgttctcttcgagcaccacccatttcagcgcgatgtccgggtggctttcctcgaacaccttggacaggcgttgcatgcggatcatgtcgttgttgttgaccgtggcgatggtcagggtctcggcgccctgggccagcaggggcagggcgaggcaggcggcggccaggcaggccttgatcgagtcgttcatcggtgaactcctcttccgggccggcgggcggcgcggaagacattattgtttttgtgtcgctcgctgccgattacacaggcgcgtcacgcaaccgacaaagcctcgactgcacttcgaccgatacttttttgcaccgccggggtggggcgctggaggctcagagcaggttctgctcggtcagccgctgggtcaccaggcgccggtagccggtgggcgtcatgcccttgagctgctggaagcgccggttgaaattggacaggttgctgaagcccgactcgaagcacacctcggtcaccggcagctcgctgcgggccagcagctcgcaggacttgctgatgcgcaggcggttgacgaactcgacgaagccgcgcccggcggcctgcttgaagaagcgcgagaagtaggtgggggtcatgcccaggtgggcggcgacctgctcctgggtgaggtcctgggcgtagtgctggaagatgtagtccaccgcccggttgatccgttcgacgttgtgctcgtcggccagttgcgaggaagtgacggtagagagcaactggtagtcctcgcattcggcgagctgttccatgaggataaaaaagtatcccaggcgggtcatgccgccgctgtcggcgatgcgttgcaagagtcgccggctttcgccgatcagcgccgggtcgcggaactcgatgccgtagcgcgcccgcgccagcagcggggccaggcggttcagctcggagaatacgccgctgccgtcctccagcacctcgtcggtgaagttcaccagcatgtcgcgccgggccaccacctcgtcgggctccacctggctgatccagttgtgcggcaggttgggaccggtgaggaacagggtgtcgggggcgaagttgccgatgtagtcgccgatgaataccttgccggagctggcgacgatcaggtgcagctcgtattccttgtggaagtgccagcgcaccagcgggctggggaagccgtgctggcggtagatcagcgaatggccttcgtgatcgtccatcagctcgtaggacggatcggtgactttgctggctctgggcatgggcgcgggccgaccgggggaacgaaggcacatcctagcccgaagcggcggggctgtgcaggggaccacccgcgagcctcgctcccctgcgtggcgccgggtggccgcaggggcgggtagcgggccgtggctctatccgccgccatccgcttcaacgccgcgccgtgacctgcggcgtggcgccgggaaccgccaggttcaccgccttctcctcgcgcggcgtaccttcgggcacccagtcgtaggccaccggcagcgcgcggtagacccagttgctccgggcgtcgccgcgcggcgccttgccgaagtaggggctgacgtactcccagacgatctcgccgccgggcgttacctggaagaagcgtccgttctgcccttcgtcgatcagcgtattgccgttgggcaggcgccgcgcgctgctgatgaaggcgctgtagaaggcccagccgggctgctgcgagtcctcggcagtgtattgccagacgatctgcttcttcagcgggtcgatttccagtacccgcgagccggagaccagcccgcgctgtaccgaggggtaaccggcgtcaccctggttgtcgaacaccagcaggttgccggcgcccggcaggccctcgggaatgaggtgggcgtcgtgctggccactgatctggtccaccgggcgcggcagcttacgggcgctcttggggtcgatcggcggaaggttcgggccgaggcgccagaccaccttgccgctggccttgtcgacgatcgctatgaagttggcgttgcgtgagtcgagcagcaggttgtccggggcgaagcgccggtcgccggcagcgtgccagcggttctcgccgagcggggcgaggttgttgatgtgcaggtagtcggggttctcgctggcccgtacccgcttcaactggtcggcggtgaatccgaattcgtcgagatgctccgaagcggtccagctccaggccagcttgccctgcggcgtgacctcgtagatcacgtcatcgattacccggggcacggcgaagcccttcaccgcgtggaccttgttcgccagcagcagggtgttgccgttggccagccggcgctggtcgtggtgctgatgggcggcgccgcccggcgcctggtcaccccagcgccagacctccttgccatcccagtccagctcgccgagggcctggttggccaggccgttgccgggcgaggccagcttgtccggagcggccaggtcggccagttgcagcagcacatggccgcgcttgccgccgttcagggccgggtcgatcacggcggcggggaagccggggtagtcccagcgcttcacctcgttgccgttcatgtcgatcaggtgggtcttacggtctgcgccgctgaagatcacgtactggttgaaggccttctgcgggtcgtagcgggtcactccggtggggtagacgctgggcgcggcatgggcgccggcggcgagcagcgcggcgctgagcaggagcatcgggaatctgggcatggcgggttcctcggcgatcggttcagaagtcgtagcgggcggtcacgcccagggtgcgcggcgtgccgagcacgccggcgtagccgccgttggcggaattccagaggctggtgaagtaggtcttgtcgaaagcgttcttcagccacagggacaggtcccactggccgtccccgtagtcgccgcgcaggccggcggaggcgttgaccagggcgtagctggggatctgtccgtatgcggaatcgtcgatggtgcccaccgccctggagcggaacgcgtagctggcggtgaggtagggctccaggccatcgtcgagcttccagcgatactcgccattgaggttggcgatgtacttcgaggcaccgaccacctggtgcccgctgaggtcgcaggacgccggggcgccggtctggaaggccacctcgggggcgcacggggcgttcttgtaggacaggtagcgaacgtcgttgtaggacgcattgaaattcagggtcaggccgcggatcggcagggccgtcgcttcgaactccaggccgcgcgagcgcacatcgccggcattggtcaggtactgggtgcggttggcctcgtcgtaggcattggcctggtagccgtggaccacggtccagaacaggttgccgttgaggatcaggcggttgtcgaggagggtggtcttcaaccccagctcggcatcgttggcgcgctcggtgccaatcagcagcgagtcggcaccggcgctgggagcgctggccacggtcaggttgacgccgccggatttctcgccgtgggacagcgaggcgtagcccagaacctggtcgctgaagcggtagctgaggctgagcagagcggacggactgacgctgtgcaggccgatgtcgccgctgtcgtaggcgccgaccctgccgttgcgcgcggccgccgccgcgccgctcaccgcggcgccgccgagcggggcgtagcgttcgacccaggcggacttttcctcgtaggtgccgcgcacgccggcggtgaggtccaggcgctcggttaggtgccaggtgccctgggcgaacagcgcgtagctgtcggtgtcgatgtgcccgcgaccgcgggtgctgacgtcgctcagggcgccggcgggggttccgttccagatgtctgccctgggcccgtagtcggtgaaggacttgttgtcgaggtcctggccgaagtagtaggcgccgagcacgtagtcgaagaagccgccgctgggcgaagccaggcggatttcctgcgaccactgcttgtcgcgcaccgagactccggcgttataggccgccggtacgtccaggccgtcgtcgttgcgcggcgtgaaatcccaccagcggtaggcgctgatggaagtgagggtgaagtcgttggccagcttccagttggcttccaccgaggttccgccctggaacaccgtgacctgctggtccgagtcgaagttgaccttgcgccgatggccgtccaccagcgtcgcgccggccgcggcggcgcgctgttcgtagcggttcacgccgttcaccgtggggccgctgctgaacagggtaaggacaccattgtcggagtcttcctcgttgtagtcgccgatccagcgcaggctgaagtcgtcgttcggcttgaacagcaactgcccgcggaaaccctggcgtgcgccgccgttgagggtgttgccgtcgtggaggttcttcacgtagccgtcgtcgcgggtgcggtaggccgacaggcgcccggcgagggtctcgccgagcggtccggaaatcgtgcccctggcctggaagtagccgtcctcgccgccggatatctcaacgctgcgctccggagtgaagctcggcgcacgggtgccgatgttgatcaccccggccgtggtgttcttgccgaacagggtgccctgcgggccgcgcaagatctccagctgctcgatgtcgagaaggtcgaacgaggccatgccggggcggccgaggtagacgttgtcgaggtacagcccgacgctgccttccaggccgtcgctggccgggttgttgccgaggccgcggatcgacacgctggactggcgcgcgtggacgtaggcgacgttggtgctcggcaccagttgctgcaggtcctgcacccggtagatgcgctggctctccagggtttcgccgccgagcacgctcatcgcggtgggcacatcctgggagttttccacccgtcgccgcgaggtcaccgtgacggtctgcagggtggtggccggctgcgcctggcgcgcctcttcggtgcccgcgggggtgtcgtcggcgccggccagttgcgcccctccggcgcaggccaggcagatcgacaggggcagcaggcgacggcggaacggtgcgctgcgggacgacgggatggagcggtacgcgggtcggcgattcatgtgtgggtcctggatgaaggggtgactgctaattccgtatggttatttatttatgttttatattgattttacggaataagagattgcctttataaaaagcccacgccgtccccggcaattgcattcgcccgatattttccatgtagaaaatgcatatcgatctccgccagctccgccacttcatcgcccttcacgagcaccgcagcttcgtcgccgcggcgctggcggttaacctttcgcaatcggccttcagccgcagcatccaggcgctcgaacacagcgctggctgccgcctggtggaccgcgcggccaaggacttgcgtccgaccaagcagggcctgatcgtcctcgaacatgcgcgccggctggtcagcggcgcgcacaacctggccaacgagatcgccctgttcaacggcctggaggccggcgaactgcgcttcggcgccggaccggctcccgccacctggctggtgccgcgtgcggtggggcgcttcaacgtgcgttatccgaaggcgcgggtgagtttccaggtcgaacactggcaggcgctgaaccgccgcctgcaggccgaggagttcgagttcttcgtcgccgacacccggcatttcgaggccgacccgcaataccggacctcgcgcctgcgtccccggcgctggcatttctgctgccgcgaggggcatccactggccgctcgcgagagcgtttccgccgaggagctgttgagcttcccgctggcgaccaacatcagcccgccgaacatccgcaaggtgctggtggacctcagcgggcgtcccgacttccgcccggccatcgagtgcgagaacggccatagcctgctcggcgtggttctcgcctcggatgccatcggcatcagcagcggcctcggcgacctggcgccgccgggacagggaggcctgcgtccgctgcgggtgcgcgagctgcccgacgacctcgacgaactgcacacccgctacggcatcgtcagccgcgccggctacagcctgtcgccgctggcggaggcgatgatcgacgaactgaagcgggtcgacgacgccacctgaattgcgtcgcacgcatgccaactatgttccgaatgcgcttgccgccggacgcggcggaccgcgaaatgaagcgtcgtttccttttcgcgagccgtcatgagccagcccaagccgatccgcaacgtcctctacatcatgtgcgaccaactgcgtcgcgattacctgtcctgctacggccatccctatctgcacacgccgaacatcgaccgcctggccgcggagggcgtgcgcttcgcccgtgcctatacccagggcaccatctgcgggccgtcgcggatgtcctcgtacaccgggcgctacgtcagcagccaccaggtggcctggaacgcggtgccgctgccgctggaggagctgaccctgggcgactacctgcgcgccgcgggagtccgcaccgcgctggtcggcaagacccacgccacggccaacctggaaggcatgcggcggctcggcatcgatccggctagcgcgcgcggcgcggccctcgccgaagccggcttcgagccctacgaccgcaatgacggggtctacccggatgacccggccttcgccgacaagcgcgaaagcgcgccctacacccactacctgcggcgcctcggcttcaccggcgacaacccctggcacgactgggccaactccgccgccggcgccgacggggaaatcctcagcggctggcggatgcgccatgccggattgccgacacgcttgccggaggcgcacagcgagaccgcctataccacccgtcgcgccatggatttcatcgacgagcagggcgagcgtccctggtgcctgcacctgtcctacatcaagccgcactggccctacatcgcgccggcgccgtaccacgcgctgtaccgcgccgaccaggtgctcccggcgctacgcgcggcgcccggcgaagaaagcgaccacccggtgtaccgcgccttccgcgaacatcgcgagagcctcaatttctcccgcgaagacgtgcgccggcaggtgatacctacctacatggggctgatccgccaggtcgacgaccagctcggccggctcttccagcacatgcgcgccagcgggcgctgggacgataccctgatcgtcttcaccagtgaccatggcgatttcctcggcgaccacggcctgggcgagaaggagttcctcctcgagtcggcggtgggcgtgccgttgctgatccgcgatccgcgccccgaggcggacgccacccgcggccgggtggaggaggcgctggtgcagtccatcgacgtactgccgagcatcctcgaagccttcgccgtcgagcccgccagccatcgcatcgagggccgttcgctgctgcccttcgtccatggcgcgccgccggcggactggcgccgctacgccatcgccgagtacgactacgccttccaggcgccggcgcgggagcgcctgggccgacccatcgatgcctgccgcatgtacatggtgcgcagcgagcgctggaagtacatcgcctacgacggcttccgcgcccaactgttcgaccttgccagcgaccccggcgaattgcgcgacctcggcgccgacccggcgcatgcggcggtacgcgaggcccatgccgggatgctgttcgactggctgcgcgggctgaagcggcggactaccatcagcaacgcggagatcgacctgcgcggccaggcgttccgctacggcgagccggaaggcgggcgcctggtaccgatcggtctctggtgatcagcggctggccttgcgataggcccccggctgctgcccggtggccttgtggaaggcacgggtgaaggcggcggtggactggtagccgaccgccgccgcgacctcggcgacgctggcgtcggcgcgcagcagggcgcaggcgcggtgcatgcgcagggcctgcaggacctgccccggcgactgaccgctgagttcgttgaagcgcttgaagaaggccgagcgcgagagtccggtgcgttcggccatctgttccaggctccagggctgttcgggtgcctcgatcagcgcttccagcaggccggcgaactgcggctggcgtgccagtgccaccaggccgccgagggtcgggttgtcgagcacctgctggcgcaacacgtagaggaacagcaggtggctgaggcgctccagcagaaccggcgacggcgccggctggcggcggcactcgtcgacgatcagggcgaacaggcgtcgcgccgcgtccagcgccggatcgccggcgcgcaggatcagccagtcgggcagggcgtcgacgatcagcccggacaatcccgaatggaagtggaagaacccgcagaccaggccggcaccgtccgccgcgttccactccagcgcctgcatttcgccacgcggctggcagcgcgcggcctcggcggtggcctcgctggacaggcggaacttgacgtcgcgcaggaagaacagcgcgtcgccgctgtccagtcgccagccccgggcgcttccggcgacgtgcgcccagcagtgtccctgcaccaccaggtggaagctggcacgcgccagaccgtgggtggaggcatgccagccgccgcagtagcgaccgacatggaacaggctggtgtcgacttcgaggctgtctaataaccaatcgacaagggggttggacgaattcatctaagggaaagactcaagagcaagtgatagcgactttagaatattgaatggatttcttattaccaagagacttcttcgacacctcaaccaccggagtcgaaagcatgtcacgcgttcccgtgctcaccctggaaaacgcccccgaggcggcgcgtccgttcctccagaccgcgctgaacaactcgggttatatcccgaatctgctcggcgtgctggccaatgcgccggccgccctggaaacctacctcaccgtgtccgggctgaacgccaaggccagcctcggcctgcccgagcgggaagtggtgcaactggtggcggccaccacccatggctgcgacttctgcgttgccgggcacaccgcggtggcgcgcaacaaggcgcgcctgccggagccggtgatcgaggccctgcgcgcccgcggcgaactgcccgatgcccgctacgaagccctggccgacttcacccgcgcggtgatcgccagccgcggtgcggtcaccgacgagcagttcgaagccttccgcgccgccggtttcgaccaggcccaggccctggaagtgatcctcggggtgagcctggcgacgctctgcaacttcgccaacgtgttcgcccgcacgccgctcaatgccgagctggagcaatatcgctggaccaacccgcaggcctgagcctgcgcttgccgggcggcatgccgcgccggcgcaaggagtgacgaccatgcttgacccgaccctgagcgactggctcgaccgccaggccgacgccctcgaccgcggcgacgccgatcccgccgcgctgctgccgcgcctggccgccgccggcgtgctcggcgtggcggtggaggaacgcctcggcggcgccggcggcacgctcgccgacgcggtggagcgggtggccgcagtggcggcgcgctcgctgaccgcggcattcgtcttctggggccagcgcgctttcatcgagtacctgttgcagagtcccaaccaggaactgcgccaacgcctgctcggcgacctgctggccggccgcctggccggcgccactgggctgtccaacgcgatgaagttcctctccgggatcgaggcgctgcaggtggtggcgcacgcggaggaggccggctggcgcctggacggtcgcctgccgtgggtgaccaacctgcgcagcggcgatttcgtggtggcggcggcgatcgaacacggggagggcggcaagcccttcgtcctggcgattcccgaaggactcgccggcttgcagcgctcggcggacctgcgcctgctcggcctgcaatgcagcaacaccgccgccctcgatctgcgcgcggtggcggtcgggcgcgactggctgttgcacgacgacgcccggcagttcctgccacgggtgcgcccggccttcctcggcctgcaatgcggcatggccatcggcctggcgcgccgcgcactggacgaagtgcagcggcacctgggcggcagccgttcgctcctggatggcgagctggcggcacagcgcgaaaccctcgacggacacgtggcggcgctgcacgccggactggccagcggcgagttcgccagccagccggcacgcctgttccgcatccgcatcgggctcgccgaagccgccgccaatgccgtgcaactggagttgcaggccagcggcggcaaggcctacctgagcgagcacggcgccggtttcgcccgccgctggcgcgagtcggcgttcgtcccgatcgttacgccgagcctggtgcaactgcgcgccgaactgcaacgccaggccgaggccaaggcatgagcgaggcgctcctcgacgctcgcgggatcgccctcggctatccgcgcggtgccggctggcaggcggtgctcggcgatttcgaattgcgcctgggcgccggcgaggtggtctcgatcctcggtcccagcggcgtcggcaagtccagcctgctgcgcgtgctggccggcctgcaggagccggccgccggcagcgtgcgggtactcggcgagcccctgcgcggaccgcatccgggcgtcgcggtggcgttccaggaccccagcctgctgccctggctgaacctggagaagaacgtcgccttcggcctcgatttcgcccgccagccgcacctcgacgcggccacccgccaggcccgcgtcgaccaggcgatcgccgcggtcggcctggagcacgcccgtgcccgctacccggcgcaactctccggcggcatggcccagcgcaccgcgctggcccgctgcctggcgcggcagccgaaggtgctgctgctcgacgaacctttcggcgcgctggacgaagtgacccgcgccgacatgcagcagctgctgctgcgggcgatccacgagcgcggcaccgccgtggtcctgatcacccacgatatcgacgaggccctgctgctctccgaacgcatcctgctactgggtgacagcccggcgcggaccctcggcgagtggcgcatcgacctgccgcagccacgcgcggagctggtcgaggaactgggcgcgttgcgcatcgagatcctgaaaaccctacggcgggcgagccgcacccatgcccatcccatcgctcagccggaggcctcccatgtgcctggacgacccgacccattcccgacgtgacatcctcaagctcgccgcgctgctcagcgctgccggcgcgttgccgctgctgagcagcctgcaggcgcgtgccgccgccgaacccgacgcgccggtgcgcatcggctacctgccgatcaccgacgccacgcccttgctggtggcccatgccaacggcctgttcgaggccgagggcatccaggccgaacggccggtgctgttgcgtagctgggcgcaggtgatcgaggcgttcatctccggccaggtcaacgtcatccacctgctgtcgccgatgaccgtctgggcccgctacggcagcaaggtgccggccaaggtggtggcctggaaccacgtcggcggctcggggctcacggtggctccggagatcgccgacgtgcgccagctcggcggcaagagcgtggcgatcccgttctggtactcgatccacaacgtggtgttgcagcaattgctgcgcgacaacggcctgcgcgcggtgagccgtgcggtgggcgcggcgctggccgccgacgaggtcaacctggtggtgctgccgccttcggacatgccaccggcgctggccagcaagcgcatccacggctacatcgtcgccgagccgttcaacgccctggcggagaacctcaaggtcggccgggtacagcgcttcaccggcgatgtctggcgcaaccacgcctgctgcgtggtgttcatgcacgaacacgacctggagcggcggccgcagtggtcgcaaaaggtggtcaacgccatcgtcaaggcccagctatggactcgcgggcaccgcgccgaggccgcacagttgctgtccaaggccggagccaaccgctacacgccgcacgcaccggaggtcctcggccgggtgctggcgccgggcgccgaggagcagcaggcctatctcgccagcggcgcgatccgccacgccgactggcaggagcggcgcatcgacttccagccctatccctatccgagctataccgaggaactggtgcggcggctgaaggacaccctgatcgaaggcaataatgccttcctcgccggcctcgatccgcgccaggtggccagtgacctggtggacgaccgcttcgtccgccaggccctggcagaggtcggcgggttgcaggcgttcggcctcgccgagggcttccagcgcagcgaggagatcagcccgtgaggcagacgctgcgccagggcgcgctaggcgtcgccgggctgttgacgctgttcgccctgtggtggctcggcgtggccctgttcggcgccgccgacggcctttcggcacgcttctcgccgcaggcgacgttgctcagcctgggtgaactgctggaacgccgcgaactctacgagcacgtgctggtgagcctgaaacgggtcctgctgggcttgttcctggcgctgctggtgggagtgccgctggggctgctggtgggcgcctcgcgcaacctggaagcggcgaccactccggcgttccagttcctgcggatgatctcgccgctgtcgtggatgcccatcgcggtgatgctgatgggcgtgggcgaccagccgatctatttcctgctggccttcgccgcgctctggccgatcctgctgaataccgccgccggcgtgcgccagctcgacccgcgctggctgcaactgagccgcagcctcgccgccacgccctgggaaaccctgcgccgggtgatcctgccgggcatcctcggccatgtgctgaccggcgtgcgcctggccatcggcatcctctggatcgtcctggtgccctgcgagatgcttggcgtcagcgccgggctcggctactacatcctcgacacccgcgaccgcctggcgtactccgagctgatggcgatggtgctgctgatcggcctgctcggctacctgctcgacgcggcggcgcgcggactctaccggcgctgggcgcacggggcgctcgggtaggacgaggtaccggtgcgctggcggatagcgccggggcgctattcgccctacggggtaatggggcgctcgggtagggcgaatagccgctcgcggctatccgccggacggggtaccggtgcgctggcggatagcgccagggcgctattcgccctacgggttacgaggaactcgggtagggcgaatagccgctcgcggctatccgccgggcggggttccggtgcgttggcggatagcgccggggcgctattcgccctacgggttacggggagctcgggtagggcgaatagccgctcgcggctatccgccggacggggtaccggtgcgctggcggatagcgctggggcgctattcgccctacgggtcaatggggatgctcgggtagggcgaatagccgcttgcggctatccgccgggcggggtaccggtgcgctggcggatagcgccggggcgctattcgccctacggggttcggggttcggggctcgggtggggcgggcgaatgtgttgatccaccaacacttgcccagcagttgcgcccgcacagcgacaggggcttgccacccaggccttgtccggcgcggccccgcggcccggcacgggctgtgcacggggtgccggatgcacaggcaagccaaggagtccccatgccgcgcgaaatccgtctcaacgccttcgaaatgaactgtgtcggccaccagtcgcccggcctctgggcgcatccgcgcgaccgctcctcgcagtacaaggacctggagtactggaccgacctggcgcggttgctcgaacgcggccgtttcgacggactgttcatcgccgacgtgctgggcatctacgatgtgctcgacggcaatggcgacgcggcgatccgccaggccgcccaggtaccggtgaacgacccgctggcgctgatcacgccgatggccgcggtgactcgccacctgggcttcggcctgaccgcctcgctgtccttcgagcatccctatcccttcgcccgccgactctcgaccctggaccacctgaccaagggccggatcggctggaacgtagtgacctcctacctggaaagcggcgcgcgcaacctcggccagcaggcccagctcgaccacgaccgccgctacgactatgccgacgaatacctacaggtgctctacaagctcttcgaaggcagttgggaggacggcgcggtgctccgcgaccgtcgccgaaggatcttcagcgacccgggcaagattcacgagatccgccatgtcggcgagcacttccaggtacccggcatccatctctgcgaaccgtcgccgcagcgcacgccggtgctctaccaggccggcgcgtcgagtcgtggcaagcgcttcgccgccgagcacgccgagtgcgtgttcgtcgccgcgccatcgaagaccgtgctcaagcaggcggtcgccgacatccgccagcgcgtcgccgaggccggccgcgatccgcgcaaggtactggtgttcaacctgcagacggtggtgctgggcgaaaccgacgccaaggccagggccaagttcgacgaataccgcgccttcgtcagctacgaaggggccctggcgctgatctccggctggaccgggatcgacttcggccagtatcggccggaccaggtgctgcggcacatccacaccaatgcgatccaatcggcggtggaagcgttttccagcgccgatccgacgcgcacctggacggtccgcgagctggccgactgggtcggtatcggcggcttcggcccgctgttcgtcggcagcccggcgaccgtcgccgacctgttgcaggagtgggtggaggacaccgacgtggatggcttcaacctggcctatgcgctggcccacgaaaccttcagcgacgtggtcgaattgctggtgccggagttgcagaagcgcggggtgtacaagaccgaatatgcgccggggactctgcgcgagaagttgttcggcgacggcccgcgtctgccggattcccatccggcggccggctatcgcgacctgcgggcgctctgggagaaggaggccgggcgcaacgcgctgccggcctgacctgggcggacggcggatgacgccagtggcgatatccgccccagggcccgggacggctgctagagccaggcgtgccgcggtggcttcaccccattcaactggtagttgccgatggcatggtatttccagcgcaccgggtcatgcagggtgtgggtgcgggcgttgcgccagtggcggtcgagattgagttcctccagggtcgagcgcgtgccggccagttcgaacagccggttggcggcgagcagggcggcttcggtggtgagcaccttggcctcggccaccgcgatcgaggcggcggccacgctctcctcgtcgggggcggcgagcgccgcttcgatggcgtcggccgccaggtcgagcacggcttccgcggcgcgcacgcggatgcgcaggtcgccgacctgctggatggtgtaggggtcttcccaggcatgctgctggttggcgtctatccatggccgcgcgtggcggcgcacctgctgcacggtctcggcgaggatgccacgggcgatgccggcgtcgatggcggcctggatgaactgcgatacggcgccggcggcggtggggcggtcgaaggcgcggtgcaccgggatgacgtgctcggccggcacccgcacgttgtccaggatgacggtgccgctggcggtggtgcgctggccgaagccggaccagtcgtcgatcaccgtcagccccggcgcgtcgcgcgggatgaacgccaggtgcgcgcgctgctcggcgtcgaggccgacggccggtacccagtgggcgagcagggcgccgctcgaatagaacttgcggccgtcgatgcggaacccgtcgccatccgccagcactcgtgtctggaattcggcgacggtacggctgtggcgttcggagaaggcgttgccgaagcgcacgccgtctagcaccaggccgtagaagaagcgtttctgctcctcgctgccgtccaggcgcaaatggtcgagcaccgccaggtggttctgcggcaactgcgccagggacgggtctaccgcggcgatggtcttcagtacttcggccagggtccggtagccgacctcggcgccgccgtaggcgcgcggtacgctgatgccccataggccgctctgcgagaaggcttccagttcggccaccggcagccggcgctggcggtcgcgcagcgaggcttcctcggcgaacagcccggccagttcgtgggcgacgcggatcgcctcggcgtcgtcggcgatgcgccgggccggggtccgtggcagcggttgccgatagggatcggcggcgttcttttccagtgcgctcatggcaactccttgcgatgggatgggcgaggttcagcgggacgccgtggccggaccgctgccgatctgccagacgtagggcggctcgctgccgttgatctcccagtcgccgacgatccgttgcttgtagatcaggggattgtgcgaggcggcggtgcgcgcattgcgccagtggcggtcgagctgcttgccgcggccgacggcggaagcgccgctggcgtcgaacagctcgctggtggcctgcaacaccagttcggcgacgatcgcctgggccttggccgattcgatctcggcggcgatattggcctccttctccgcctgcgggtcgcctacgaagcgcgccaggtaggcgcgctgggccgcttcggcggcgcgcagggtggccgcctcggcggcgtagacgcgcgcggcgatgcgcccgaccacctgctgcacctggggatcctggctgactcgcggggcattgccgtggctgtagatacgggtccgcccgcgcacctcggcggcgacgtcgcgcaaggcggcgcggccggtgccggccagcaccgcgagcaggaccaactggtagaacgcggtctggtacttgaagcggctggcgaagtcgatgaggttctcttcctccacctcggcatcctcgaacagcgacgtgccgctgccggtggtgcgctggccgaagccgtcccagtcgtcgctctggcgcacgccgggctggtcggtgcggatcgccgcgatcacatcggcgccggtgtcgtcgcgctgggcatacagatcgatccagtcggagaagaggctgccggtgctgtagtacttactgccgttcaccacccagcgaccgtcgtccttgcgcgagacgcgggtgagcacttcgcccagccgtaccgaaccgacctcggtccaggcgcagccgaccaggtcgccctcgacgaagcgccgcagccaacggtcgcggccagggccgggctcggcattgagacggtcctcgacgaaggcgaagtggccgcgcagggcctgggtgatgttggagtcggcctcggccagttcgatcagcaactgaaccaactgcggcagcgaggcgccggcgccgccgtgctcgcgcggcacgcgcacggcgccgaagccggcctgcttgagccaggcgatcgcctcgtggggcagttcgcgttgtcgttcgcgctcgacggcgccttcggcgatgcgcgcgaagatcggtcggaaacgctgggcgagcagttcgtagtcggcgccttcggagagactggcggcggtggcttcgggatggacgcgggcgttcatgcggactcctggtaggcagcggggccgtccggtcgacggctaccctggagtccgggccgttgcacagcctgtgccgacccgcgcaggccactggttgcgcgggttcgcgcgagcaggaggtgttgccggggcggcagcctgttgcgcggctgctgcctggcggacagtgggggaggtggcggcaggtccctctcccggcgggagagggacaggcgcttcagaagatgtagtcggtggtgaggaagttcgacgcgcggttgcggatgatctcgctgaccagggtcttgttcgcctcggtgtcgcgggtcgccaccagggtgcggatggagaacacccgcagcgcgtcatggaccgacagggtgccttccgccgaattcttccggccgttgaacgggtagctgtccgggccgcgctggcactgggcgttgacgttgatccggccgacctggttggcgaaggcgtcgaccagccggccgatctgcgccgggtcgttgccgaacaggctcaactgctggccgtagtcggagcgcaggacgtagtcgatcacctcgtccagctcgcgatagggcaccaccggcaccagcggaccgaactgctcctcgtggtagaggcgcatgtccgggctcaccggactcagcagagcggggtagaagaaactttgccgatgctcgccgccgcccgcattgaccactcgtgcgcccttggccagggcgtcgttcagcaggccttcgaggtagtcgaccttgcccggctccggcagcggcgtcagcgccactcccggttcccacggcatgcccggcttgaggctggccaggcgcgcgctgaacttgtcgaggaacggtcgcagcacgctttcgtggacgaacaggatcttcagcgcggtgcagcgctggccgttgaaggacagcgcgccggtgaccgcctcgttcaccgcgttgtccaggtcgacctgcggcaggacgatacccgggttcttcgcgtccaggccgagggcggcgcgcaggcggtgcgggcgggggtgcagcttcttcaggtcgctggcgccggaatgggtgccgatgaaggcgaacacgtcgaccttgccgctggccatcagcgccgacacggtttcccggccgcgcccgtagatgacgttgatcactcctggcgggaagctgtcgcggaaggcttccagcaacgggcggatcagcagcacgccgaacttggccggcttgaacaccaccgtattgcccatgatcagcgccgggatcagggtggtgaaggtttcgttcagcgggtagttgtacggccccatgcacagcgccacgcccagcggaacccggcggatctggccgagggtgccctgttccagttcgaaacggctggagcggcggtcgagttccttcagcgcttcgatggtatcgacgatgtagtcgcaggtgcggtcgaactctttctcggagtccttgaggttcttgccgatttcccacatcagcagcttgaccaccgcctcgcgttgctcgcgcatccgcgccaggaagcgttcgacgtgctggatgcgctcggccacccgcaggttcggccacaggccctggccgtggtcgtaggcccgcaccgcggcgtcgagcgcggcgagcgcagcgtcggcgtcgagcagcggggtgctgccgaggatcacctggcgctcgccgtcggcctcggcgaggaataccgggctgcgtaccggcgccagcgggccgtcccaatgtcgcagttggccgtcgaccaggtagtcgcgctgctcgatgggggcgtcggggcggtactgctcgggaatggcgtcgaggctgggaaacagcgaatcgaggtggagcggggcggtcatggcgggtcctcgaatgacgtggatgaaaggcgtgggactgttgtagcgcggtccggatcgaaggtaaatcgtttcagcaggaaaaccgtcgcgcccttgccggaaatcagcctttgctcccgcttcgtggggggcgggagcaaaggcatggcgccggctggcttcaggcgtccgcggtaggctcttcgcggggccgcgccggcggtggctcaagcagttcctgctgctcggcatagcgctggcagatatcgaagtcgcgcggccagcgcgaggcttcgtggtcggggcgttgcattggttcggtcatggctgaactccggtcgggctggtgctcagagcaccagcgacagcaacaggatgaagaccaggccgaccacggagaggatggtctccatcgcggtccaggtcttgaaggtctcgctgacgctcatgttgaagtactgcttgaccagccagaacccggcgtcgttgacatgggagaggatcagcgagccggcgccggtggcgagcaccagcaactcgcggttgacgccgggaatcaggtcgatcaccggcaccacgatgccggccccggtgatggtggcgacggtggccgagccggtggcgatgcggatcaccgcggccaccagccaggccagcaggatcggcgagatctgcgcgttcaccgcgagatggccgatgacgtcgccgaccccgctggccaccagcatctgcttgaagccgccgccggcgccgatgatcatcacgatggcggcggtcggtgccaggctctggtcgagcagcctgaggatcttcttcgagtcgaagccacgggcgtagccgaaggtatagagcgccaccagcagggccaggagcagggcgctgatcggatggccgatcatgtccatccaggcgcggaacgcgtggccatcggggaaggcgacgtcggcgaaggtcttcagcagcatcaggaacaccggcagcagcacggtcgccagggtcacgccgaagctgggcaggtcctgggtctcgggctcgtgggcgatctgctcgaccagttccgccgatggcgtgccgggtatgtagcgcgagaccagcgcgccgaacagcgggccggcgatggcggcggtgggcagggcgacgatcaggccgtagaggatggtcttgccgatgtcggcgccgaacacgccgatcgccagcagcgggccgggatgcggcggcaccagaccgtgcaccgcggaaaggccggcgagcaacgggatgccgatcttgatcagggacacgccgctgcgccgggcgacgatgaacaccagcgggatcagcaggatgaagccgatctcgaagaacagcgggatgcccaccaggaacgcggcgagcatcatcgaccagtgcacccgctccttgccgaaggcgcggatcagggtgcgggcgatctggtcggcgccgccggaatcggccatcagcttgccgagcatggtgcccagggcgaggatcacgccgacgaagccgagcacgccgccgaagccgtcctggaaggatttgacgattttctccaccggcatccccgaggtcaggccgaggaagccggcggcgatgatcagggcgatgaagggatgcaccttgaagcgggtgatcagcacgatcaggccgatgatggtcaccagggcgtcgaggagcaggtaggcatcgtgtgacatgccgaacatggagggctctccttttgtcgttgttctaccggagttgctgtttcattgaagcgctttttcggggtagcgctatctttgtcggacaagcgaaagacttcaggcggcggcgtgctccagccaccaggcgtgggcggcctgcgccaggcattccaccggcagggtggcgtccaggcgcagggtcaggggttcgtcgagcggcggctcgagggcggcgaactggctgtcgatcagggtcgccggcatgaagtggccggggcgctgggcgacgcgctcggcggcgaccgccggggtcagttccaggtagacgatgccgaggccgggcaccgcgcggcgcaaccggtcgcggtaggcgcgcttgagggcggaacaggtcagtaccggcagcttgccggcggccaccgcctggcgcagctgctcggcgagggtgtccagccagccggcgcggtcgtcgtcggtgagggggatgccggcgctcatcttgcggatgttggcggcgggatggaagctgtcgccttcgatgccgtgggcgccgctgcgctggcagagggcctggctgacgctggacttgccgcaaccggcgacacccatgatgaccagggcttggaggggtggatgcatggaacacctcaagcgtgagacagcgctgtctttgcgacctggaaaaaatcgcgcgagcctggctccgccttcttgtcgttgtggtctgtcgaatcccgcgcgggcagtggcggacaggccgcctcaggcgattgcccaggtcgcgagacagcgctaccttagtgcctggaattttgtttggcaagcaggccacgatgagcatcaccaagaacgacaagaacacgcgaaccaccggacgtcccaccctcaacgaagtcgcgcgccgcgccggggtcagcccgatcaccgcgtcgcgcgcgttgcgcggcgtcgccagcgtcgccgaagaactggcgcagaaggtccgcgacgccgcccgcgaactcggctacgtggccaaccccgcggcgcgcgcgctggcctcggcgcaaagccacagcgtggcggtgctggtgccgtcgctggccaacttgctgttcatcgagaccctcgaggcgatccacgcggtactgcggccgcagggcctggaagtgctgatcggcaacttccactactcgcgcaacgaggaagaggacctgatccgcaactacctggcctaccagccacgcggcctgctgctgaccggcttcgagcgcaccgagagcgcccggcggatgatcgaggccagcggcattccctgcgtgtacatgatggacctggactccggctccgggctcaattgcgtcggcttctcccagttgcgcgccggcgaggccgccgccgagcacctgctggcacgcggccgcaggcgcctggcctacatcggcgcccagctcgaccagcgcaccctgctgcgcggcgaggggttccgccgcgccttgcaaaaggccggctgctacgacccggggctggaaatccttacgccgcggccgtcctcggtggccctcggcggcgaactcttcgtgcagttgctggccagccagccgcaggtcgacggggtgttcttctgcaacgacgacctggcccagggcgcgctgctggaggccctgcgccgtggggtcaaggtgccggaacagatcgccgtgctcggtttcaacgacctgccgggttcggactgcacggtcccgcgcctgagcagcatccgcaccccgcgcgaagccatcggccggcgcgcggcggagcagttgctggcgctgatcgccggcaaggaggtgcgcgatagcgcgctggacatggggttcgagctgatggcgcgggagagcacctgaacccgcggcccgacggtgcggccgttcagggacatgtcgagggctgggtagcgccgccgggcgtaacggcttgtcgggtagggcgaatagcgccgcaggcgctatccgccgttacgccgggtttcacggcggataaccgcgagcggttattcgccctacgggggcgtgtcgagggctgggtagcgcctccgggcggaacggcttgccggtagggcgaatagcgccgcaggcgctatccgccgttacgccggatttcacggcggataaccgcgagcggttattcgccctacggggacatgtcgagggttgggcagcgccgcgggcgctatccgccgttacgccgggtttcacggcggataaccgcgagcggttattcgccctacgggggcgtgtcgagggttgggcagcgccgcaggcgcacgccttgcgtaacggctcgccgtctcttcggtgtctcaagccaccgcgtagtaatgcttgacgaagccgccgtcggcaacctcccagagcaccggggtgcccttgctgacgaaccagctgtcgccggccttgtagagcgtgctctggccggtggactcgtcggtgaggcggacctcgccgctgaccaccgtggcctgttcgctgaacggataggtcatgcggaacttgccggcggtggtgccgaagtaggcggcgctgaccgggtcggtgggggctcctgcggtcatcttgccgaaggctttcacctcgccttcgaggatctccgagccgaggtcggcgacgctgccccaggcgtccagttcgtcgagggtgatgccgtggcggataacggtaatggccatgggaatgctccttgtagagtgatcggtaggtttcagcgccggccgttccagtagccggagagctggtgccaggtcttgcctgcgctgagcagcagcgggcggaagtggtccttgccgtggatcgggatgcggcgcaccgagctgagcaggtcgtagcgcgccgagccttcgctcatgccttcggcgaggaccttgcagacgatgtggctgggggtcacgccgaacccggaataaccctggacgaagaacgcgttgggccgccccgagaggctgccgatctgcgggaacaggttggcgctgcaagccatcggcccaccccaggcgaggtcgatgcggacgtgctccaggtaggggaaaatcttcagcatcagcttgcggttccaggccttgaggtcgccggggatgcgttcgacgaagggtgtggcggcgccgaacagcaggcggttctcgttggtcacccggtagtagtcgatgaccgggcggatgtcgctgtaggcgccgcggatcgggctgatccgctggatcagttcgtccggcagcggctcggtcatcatctggaacgcgtaggtattgatggtggtgcggtgcagctcgggttcgagccggttgaggaagctgtcgcaggcccagagcagcttgttcgcggtgaccgagcccttggccgtgcgcacgcggatgcgctcgccgtattgcacctccagcgccgggctgtattcgaatatccgtgcgccgaggccggccagcgccttggcttcgccgagcagcaggttgagcgagtgcacatggccgccgcccatgtgcagcagggcgctgccgtaggcgtccgagccgatgatctgacgcacctcggcaccgtgcaggtaacggatctcatggggcgagccgagcgaccggaattccttttcccaggccagcagggtcttcgcctggcgtgcgttgaagcccatgtagccgtagccgtggcagaagtcggcgtcgatggcgtacttctcgatacggcccttgatgatgtcggcgccgaggtcgctgatctcgaagatcgcccgcaggccgtcctcgccgacgtccttgcggatcttctccaggtcgtggccgatgccggccatgatctgcccgccgttgcgcccggtaccgccgaagccgaggtggcgggcctccagcacgacgatgtcggtgatgccgtgctcggccagctcaagcgcggtgttgatcccggagaagccgccgccgatcaccaccacgtcggcgtccaggtcggtttccagggaggggaaggacaattcgtacttcttggtcgccgtgtagtaggtcggcgtctcgatgttgatcatggatgcggcctggcaaggggtggatgtacctattagacgctccgtggccgccgcggtcttgttcctgtctgccgccggcttgaccggccctgccaggcgcgcttcagcccagcatggcgatcacccgtggcgcgacgaagtcgatgaaggcgcgcagcttgggcgagacctggcggccggacggccagagcaggaagaactgcgcgcggcgctcgcagaaggtgtcgaggacgctgaccaggcgtccttcgcgcagcgcctcgcggatcgagaagtccggcaggcaggcgatgccctggtcgcgcagggcgaaacagacgcgggtctcgatgttgttgcagaccatcgacaccggaatctgcggcggggcttcgccgtccgcgcggcgcagcggccattcctcgaggcggccggtattggggaagcggtagtgcaggcaagtgtgtcgcagcaggtcttccgggcagcgcggcgtgccgtggcgggcgaagtaggccggcgagccgaccagcttcagctggaactcacccagttcgcgcatggacagccgcgaatccaccggctggccggtgcgcaggaccacgtcgaagccttcgtcgacgacatccaccacgcgatcgctgaagtcgaggtctagctcgatgtccggataggcctgcatgaaatcggcgagcgtcggcaggaccagcccgctgaccagcggcaggctgacccgcaggcgcccgcgcggggtctcgcggctttgcgacagctccagctcggtggcttcgatctcggccaggatgcgccggctgcgctcgaggaacaggctgccttcggcggtcagggtgatgctgcgggtgctgcggtggaacaggcgcacgccgagtttctcttccaggcgggcgacccgcttgcccaccgccgaggcgctgacgccgagggtccgggcggcgccgacgatgctgcgggtctcggcgacgcggacgaagacggtgaaaccgctgaggctgtccatgcaaggctccgattacggacatgacggtccagatagaacggaactctatccgtctttttccgcttttgcagcgctcttagcctgtccgcatccttcatctgcggagagtcccgcatgtccagtttcgaacgagagccaggctgcggcctggcggaaaatgtcgatcaggtgatcgaggcggcattcgccgaccagcgcctggtgggggcggtggtgctggtggcacaccgggggcagtggctctatcgacgggctgccggcctggccgaccgcgaagccggccggataatgggcgaggacagcctgttccgcctggcctcggtgagcaagccgatcgtcagcgtcgcggccctgagcctggtggatgagggccggctggccctcgatgagccgatcgccgactggttgccggcgttccgtccgcgcctggccgacggccgcgaggcgcgcatcacgccgcggcagttgctgagccacagcgccggcctcggctatcgcttcctcgaagccgacgcagacggcccctatgcccgcgccgggatttccgatggcatggacctgccgggtttcgacctggccgagaatctccgtcgcctggcctccgtgcccttgctctacgaacccggccgcgcctggggctattcgctggccaccgacgtgctcggcgcgctggtggagcgggtcgacgggcggccgctggcggaagcgctgcggcagcgggtcgggattccagccggcatgcgcgacagcggcttcctctgcgccgacgcgtgccgactggcggcggtctacgtcagcgaccggccacgcccgcgccgaatggccgggcgggagaccgtggcgccgttcgaggactgcgtcggcattcgcttcgagccgagtcgggctttcgaaccgtctgcctatgcgtccggcggggcggggatgatcggcagcgccggcgacgtgctgcgccttttggaaatccttcgccagggcggcgcgccgttgctgacgcctggcctggtggaggagatgggtcgcgaccaggtacccggcctggaactgccggccaatcccggtttcggcttcggcctgggtttctccgtgctgcgcgacccggctatcgcgcaatcgccggaggctcccggcacctggcgctggggtggcgcctacgggcattcctggttcgtcgaccgggcccgcgaactgtcggtggtggcgcttaccaacaccctgttcgagggcatgtcgggacgcttcgtcaacgacctgcgcgacgccgtctaccgttccgcggagctgcgctgatgggacgccgcgaagcatttccggagaacgccggggccgctgcgtcggccgtggcgccgcggctgccgctgagtgcgctgctggcgatggcgatgtccggcttcgtcgccattctcagcgaaaccctgccggccggcctgctgccgcaaatcggcgcggggctggcggtcagcgaggcgctggccgggcaactggtcagcgtctacgccttgggttcgctactggccgcgctgccggcggcgagcctgacccagggctggcggcggcgccgggtgctgctgctggcgctgctgatcttcttcgtctgcaacagcctaaccgccgtttcctcggattaccgcctgaccctgctggcgcgcttcggcagcggcgtcgccgccggcctcgcctggggcctgctggccggctacgcgcggcgcctggtgccgccggagcagcaggggcgggcgctggcggtggccatgctcggtgcgccgctggcgctgtcgctcggcgttccgctgggcacctggctgggcggcctgctcggctggcgctgggccttcggcctgttgtcgctgaccgcgctgctgctggtcggctgggtgctgcgcagcgtgccggacttccctggccagccggccgggcggcgcctgcgtctgctcggggtgctgcgcacgccgggcgtgcgtccggtattgctggtgatcgtcgcctgggtgctggcgcacaacatcctctacacctatatcgcgccgttcctcgccaaggtcggcctgggcgcctcggtggacctggccctgctggtattcggcagcgccgcggtggcgggaatctggctggtcggcgtgctggtcgaccggcacctgcggcggatggtcctggccagcctggcgctgttcgccgtggcggcgctggcgctgtgcctgggcgctcgctggagctggctggcgttcgccggcctggccctctgggggctgacgttcggtggcgcggcgacgctgctgcagaccgcctcggcggacgccgccggggagggcgccgacctggcccaatcgatgatcgtggtggcctggaacctggccatcgccggcggcggagcgttgggtggcatggtgttgcagcgctggggcagcgagatgctgccctggaccctgctaccgctgatcggcttggccgccgtgctggcctggggcaatgccgcgcacgctttccgcggcggcccgcgcgacttccgcagggcatcgcccgagcaccggaaagcggcgcaatagacggggctgcgcccggcaaggggaaaaaggctgcgggtcttagaacgtttattcacctgggttatttggataggtccgtttcgaatatccatcgcgtcgaaataccggccgtgacgatgcgttcctccgccatacagcggaatccgctgtcattgcgccgaacatcttcgctgtctcgccgctagccaccatgcagcgcccggctcggctgttgcaccggcatcttgccggtgcgtcggcgctgcctagaatcggccccattcgcacctacccccgcttcgcctacaggagttaccgccatgatgaatgccatgcagatgccgatgaacatgaatgccgccatgccgatgatgcccatgatgggcatgccgatgatgatggcgaccatgcagtgcgaagcgatggacgacggcatgctgtgcaagatgatgccggcgatgggtatggacatgggccagttccgcaacagcgccgagatgatggcgatgatgatgaactgcggcatgcccatgatgatgcagtgcggcaacctggcgatgatgggcatgtcccaggcctgcatggcgatgatgccgacgatgggcatggggatgggcatgccgatgatgggcatggctccgatgaagtgcatgatggagtgctccatgcagggcgacgccatgcactgcaggatgatgccgatgcagggcatggacatggagatgttcaagaactgctgcatgctgatggcgaagatgatggagtgcggcatgccgatgatgatgagttgcaacggcatgccgatgatgtgctgcacctgctgatccgtcgccggatggaaaaggcccgcccgggatgaccgggcgggcctttcttcgtccatggcagcaaggccgggggtcagtccaggcgctccgggtaggtcatcaccaggtacgccagggcttcgctatcggcggggttgcggtagctgtgcggctggtcggcgtagaacaggatcgagtcgccggtggcgagcaggaagcgctcctcgttgacccgcacttccagtaccccctgcgccaccaccaggttctcctgggtgccgggggcgtgggcttcggcgtcttcctggccgaggccgcgcaggcgcagttcgtagaactccacctggcgcgccacatcgaaggggaacagcgcgcggctggtgaaggcgccgtcggcgctgaccaggcgcttgctctgttgcgccggcagcacggcgacaccggcgaaggcgcgatcgtcgaggaaggctgccaccgacaccttgagaccctgggcgatcttgcacagcaccttgatcgacggcacgctgcgcccggactcgatctgcgccagcatcgcccggctgacaccggaaatccgcgccagggcgtccagcgagagattgcgcttgccgcgcaggcgcagcaggttgtgggcgacgcgctggccaatcagatcatcgggttcggtatgcacgccggcggccagttccaggtgggcaacgccatcgctggcgggcaggttcatcggtcaggcccggcggctgcgctcgtcgtgcctggctggcggttgcggcacggcgtagccggcccgccaggcgtacaccgcccacatcatttcgcccaggcggcgtgcctggcggcgcgagcggtagcgggcgaaatcgatgacgttgtcggtgcggtccatgaggcattcctcgggcggcgggttcgatggcagccagactatcccttcgccgcttagagccataaatactaagtttttatttattaattcacttttgtgcttacaaggaacaccgaaccgtacggagcagcatatttatattctttaaagatatttaaattaattttcttattccaataaattaaaggctctcgcgtacctgccgaccaatcggcgcgccgcaccgaatccatgccgccttgcgcggtatctcgtgcctggcgtgtccgggcttgcgtgggagtcagcgatgtccgtttcccttccggcgccagcgcgcgccgacgttcccttgcagatccgtgccctcgatgccgcgttcggcgccgaggtgctcggcctcgacctcgggttgcccctggccgccgaggacttccgccgtatccaccgggcgcacctggaccaccatgtgctggtgttccgcgagcagcgcatcaccccggcgcagcagatcgccttcagccggcgcttcggtgagttgcagatccatgtgctgaagcagttcctgctcccagggcatccggagatcctcatcgtttccaacatcgtcgagaacggccagcccgtcggtctcggcgatgccggcaagttctggcactccgacctttcctataaggagctgccgagcctcggctcgatgctgcatgcccaggagctgccggaggagggcggcgatactctgttcgccgacatgcacaaggcctgggacagcctgccggaagccctgcgcaaggccatcgagggacgcacggcggcgcattcctataccgcccgctacagcgaaccgcgcttcgagggcaactggcggccgaccctgagcgccgcccagctcgccgaggtgcgcgaagtggtccatccgatcgtgcgcacccacccggaaagcgggcgcaaggcgctgttcgtcagcgaaggtttcaccacccgcatcgtcggcctgccggccgacgagagcgcccaactgctcgccgagctgtatgcgcacagcgtgcgccccgagcacatctaccggcatcgctggcaggcgcatgacctggtgttctgggacaaccgctcgctgatccatctcgccggcggttgcccggcccacctgcggcgcaagctctaccgcaccaccatccagggcgacgcgccgttctgacgacggtgcgcgcttcccccttttcgccaggagcgtttccatgaaccgcattccccgtttcacccgcctggtcgccgcgctcggcctgggcctgagcctcgccaccacgctgctggccagccggccggcgcaggccgagggcgagatccgcatcgccgagcagttcggcatcgtctacctgctgctcaacgtggtccgcgaccagcgcctgatcgaaaagcacggccaggccgagggcctgcaaatcaaggtcgactggacccaactgtccggcggcgcggcggtcaacgatgcgctgctgtccggggcgatcgatatcgccggtgccggcgtcggtccgctgctgaccatctgggaccgtacccgcgggcgccagaacgtcaaggcggtggcttcgctgggcaacttcccctactacctgctgagcaacgacccgcgggtcaggagcatcgccgacttcggcgccggggatcgcatcgccgtgccggcggtgggggtttcggtgcagtcgcgcttcctccagtacgccgcggctaagcagtggggcgacaagcagttcgaccgcctcgacaagtacaccgtggcgctgccgcatccggacgccaccgccgcgctggtggccggcggcaccgagctgaccgggcatttctccaacccgccgttccaggaccaggcgctggccaacccgaaggtccacgtggtgctcgacagctacgagctgctggggccgaattcgccgaccgtgctgttcgccacggagaagttccgccaggacaacccgaagacctaccgggccttcgtcgaggcgctgaaggaagcggcggccttcgcccagaacgacaaggcggccgccgccgatacctatatccgggtgaccggggcgaagatcgaccgagccgcgctgctgaagatcatcgccaatccgcgggtggagttcagcgtcacgccgaagaacacctatccgctggcggagtttctctaccgggtcggtgcgatccgcaacaagccggcctcctggcaggactatttcttccaggacggcgcgccgttgcaggggagttgagacgccgatgaacgccgcctcccgccaaccttccaggctccccgccgacgccctgctggcggtggacggagtcagcctcgaataccgcacccgctcgcgcgtagtgcgggccacccagcgggtcagcttcgaagtcgacccggccgatcgcttcgtcctgctcggtccgtccggttgcggcaagtcgaccctgctcaaggcggtggctggcttcatcacgcccagcgagggcgagatccgccttcagggacaggcggtcagggcgcccggccccgaccgtatcgtggtgttccaggagttcgaccagttgccgccatggaagaccgtacggcagaacgtgctgttccccttgcgggtgtccggccaggtgacgcgcgacgaggccgagcgacgcgccgacgaatgcctcgagaaggtcggcctggcgggcttcgccgaggcctatccgcacacgctgtccgggggcatgaaggcgcgggtggcgatcgcccgggcgctggcgatgcagccgaagatcctgctgatggacgagccgttcgccgcgctggacgcgctgacccggcgaaagatgcaggaggaactgctgcgcctgtgggaagaggtgcgtttcaccctcctgttcgtcacccattccatcgaggaggcgttggtggtgggcaatcgcatcctgctgctctcgccgcacccggggcgggtccgggccgaagtgcacggccacccgttcgggctgcacagccttggcggcgagccgctgcaagccgcggcgcgacgcatccaccgcttgctgttcgacgagggcggcgaaccgacggcggccgcgaccctcgacttcgccgatatccggctggcccattgagcagaggaatcgatcgatgagtcgagtcacgcgcgttcgcgaagaatacgaagtccagctcgaacccctgctggaggtctccctggagcggcgcctgcccctgagccagcgtctctggcaacagggctggctgcgcaaggggctgatcctggcgctgctggcgctggcctgggagctggcggcgcgggtccagggcaacgacctgctgctgccaggcttcctgcagacggccagggccctcggcgagggcctggccagcggcgaactgccggccaaggcggggatctccctgctggtgctgttcaagggctacctgctggggatcgtcctggccttcgttctgaccagcctggcggtctccacgcagttgggccgcgacctgctcgggaccctcacggcgatgttcaacccgctgccggcgatcgcgctgctgccgctggcgctgctctggttcggcctgggccagaacagcctgatcttcgtgctggtgcattcggtgctctgggcgctggcgctgaacacctatgccggtttcctcggtgtctcggagaccctgcgtatggcagggcgcaactacggcctgcgtggcctgcgcttcgtcctgctgatcctggtgccggcggcgctgccgtcgattctcgccgggctgaagatcggctgggccttcgcctggcgcacgctgatcgccgcggaactggtgttcggcgcgagcagcggcaagggcgggctcggctggtacattttccagaaccgcaacgagctgtacaccgacaaggtattcgccggcctggccgtggtggtgctgatcggcctgctggtggagaacctggtgttcggcagcatcgagcgcctcacggtgaagcgctggggagtgcaacgctagggcggcggacgggtggagtgttacggcaactttctcggcaactgttgcgctggcgcggcggcaaagcggagtaacgtcttgcccgcacccacttcaaaggatggaacgaatgtcgctctccgtggatctgctgctggcgttctccctgttcgccttcgtcacctccgtcacgcccggtccgaacaacaccatgttgctggcctcgggggtcaacttcggtttcgtccgctccatcccgcacatcctcgggatcagttgcggcttcttcatcatggtgatggcggtgggcttcggcctgggcacggtgttcgaggcctatccggtgctgtacaccatcctgcgctacgtcggcgcggcctacctgctgtacctggcctggaagatcgccacgtccggcccggccggcaacgacccggagggacgtggcaagccgttgagctactggggcgcggcggcgttccagtgggtcaacccgaaggcctgggtgatggcggtcggcgccataagcacctatacgccgttgcagggctacttcaccaacgtggtggtgatctcgacggtatttgccctgatcaacgcgccgaccatcggaatctgggccggtttcggcagcatgctgcgcaacgtgctgcgcgatccgcgctggctgagggtgttcaacgtagggatggcgctgctgttggtcgcgtcgctgtacccgatcctcgcggaaagccattcggcctgacctgtcaccaccctatcaattgtattagctcgtaactcgtcgccatttcgtgaagagtttttcgctcggtgcccagcctcggaagggggagagcgatgcaggagcgacatggcttaccgttacgcagcttttcgtcgggcaaggcgctgaccgcgggacgcgcagcgcgcccggaggttgcgcaggagcggcgctacctgcaaggcgccccgctggggctggagttgccgggacgaatcgccttgcgcgacccgcattgcgcctggcaatggttcgagccggaggcggccgcggaagcgttcccggcggcgcactggctggcggcgttcctggtactgctgggacgctacggcaacgaagagatcaccctgggctttcccgagccgatcacggttcgcgggcggcaggcgcccgcgctgctgcgttcctcctaccgggcgatggagtcgtccgccgaacgtagcgcgcggctggcggaagaactcgatgacgcccggcggcagctatccgccgacggccaggagcgcgccgccctggccgggcgctgcgcggtccaggtgctggcggcgcggccgacggcgagcagccccggctggctggccctggtgctggcggcggacggcagcgtcggcctggctctgcgcgatccccagtacgacgaattgcggcgtatcgccggccatctcgcgcgcctggcgcgcggcctggtcgacgcccaggcctgcgtcggccggctgccctggctggacgccgacgaagagcgccgtttgcaggccctgcgcagcgagccccaggccgccccgtcgcgcggcgtactccaccatctgttcgaggcccaggcgcggcgcacaccgcagcgcatcgccgtgcacgccgccgaccgtagcctcagctatgccgagctggagcgcgaaagcgccgcgctcgccgtgcgcttgcgcgccgccggggtggctccggagcagcgggtcggggtctgcctgcggcgcgacagcggcctgctggtcggcctgcttggcgtgctccgcgccggcggttgctacgtcccgctggacccggcctatccggaggagcgggtggcctacatgctcgacgacgccgactgcctgctggtgctggtcgacgcgagcacccgcgagcgggtcgccgcgctgggccggccatgcctgacgctggaggagggcggcgaccaggcgaacgacctggcgctgcccgcgagcgaggtcggcgccgaccacctcgcctacatcatctatacctccggatccaccggacgccccaagggcgtcgccatcgagcacggcagcgcccatgccttcctgcgctgggccggccagcactatgccgccgaagaatggagcggggtactggcggcgacctcggtgtgcttcgacctgtcggtctacgagctgttcggcaccctggccgaaggcggcacgctgcacctggtggaaaacctgttcagcctgccggactacccgcgccgcgacgagatcagcctgctcaataccgtgccctcggtgtgtgccgcgctgctcgccctcggcgacctgccgggcggggtgcgcacgctgaacctggccggcgaaccgctgcgcggccacctggtgcgacagattcgtggccaaccccaggtacggcgcctggtcaatctctacgggccgaccgaggacaccacctattcgacggtgcacgaactggacctgcacgccgaagcgctcgacgagccgcccatcggccgaccgctgcccggcaccacggtggaggtgctcgacggcttcgaggcgccgctgccgctgggcgtggccggggaactgtacctcggcggcatcggcctggcgcgtggctatttcggcaagccggagcagaccgccgagcgtttccgcgtcgatccgggcagcggcgagcgccgctatcgcaccggcgaccgcgtacgcatgcgcgaggacggcgtgctggaacacctcggccggctcgacgaccaggtcaagttcaacggcttccgcatcgagctgggcgagatcgcctcgtgcctggcgagttttcccggggtgagcgaagcctgcgccatgctcaccgaggacagcgccggcctgcgtcggctggtcggctacctggcggcgccgttcgccccgccgctccaggcgctgaacgagcaccttgggcaaagtctgccgcactacatgttgccgtcggcgttcgtggtcctggcggagctgcccaagacgctcaacggcaagatcgaccgcaaggccctgccgcgtccccaggcgaccggcgccgagccccaggcgctgcccagcgatccgctggagcaggcgctacaccaggcctggcaggcgcagcttggtgcgccgccgcgcgccggacagggcttctacgccgccggcggcgattccctgcgggcggtgcacctgctcgcgacgctgcgccagcgactgtcccgacgcgtaccgttgcaggcgttcgccggtggcccggcgacccccgaggccctgctggaactgctgcgccaggccgcgcccgagggcgacgagccggagccgagcgccggcgccgccgggctgagcctcgccgaacggcgcctgtgggtggcccagcaactggcgccggaggacacctcctacaacctgctggcccacctgcgcatagtcggcgccacggccgacgccatcgaacaggccttgcgccagttgctggaacggcatgtggcgctgcgccggcgtgtcgaaacgggcgtcgacgggccgcagccgcatgcgctggcggcgcatgcggtgcccctgcaacgcctgctggcgagcgacgccgtccacgccgagcggttgctggaggatggcgtgcgccgtgagggcgcgcgagtcttcgacctcgcccacgaggcgccggcacgcctgctgctggtcgtcacccgcgacagcgcgcgcgccgacctcctgctcagcgtccatcactacgccttcgacgatgtgtcgctggcggtctttgccgcggaactgaagacgctgctcgatggcggtcgcctgggcgtgctcgccagcacgccggaacaggttgccgcccgcgagcgcgcggcgttggcctcgggacgcctggaccgcgttgccgagcgctgggctgagcgtttgttgccgctggcgaaggctcccggcgccgcgccggcgcgcccggaggagagcggcgggcgcgccggccaacgcctcgccctgccggtttccgccgctgtccatgccgcctgccgggcgctggccgaacgcacctcggtaagcccgttcagtgctgcgctacaggccttcgccgaagtgctcggcgccgaactgggcgtcgacgacctgctcgtctgcgtggccctggccgggcgttcgcgcctggaaatgcaggggctggtcggctgcttcgtcaacctcctgccgctggcggtcggcctgcgtccggagcagtccgtggagtggcgcctgcgccaggtcggccatgatctgctggaactgctcgaacaccaggacgtgcccctcgaatgcgtgacccaggccctgcgccagcgcggcgccagcggcctgccgatccgcatcgcctgcggcgcgcacaacggtcgggcggccccggcggtggatgccggggtgcgcgtcgaagccgacttcatcccggtgcctggcgcgcgcctggacctgacgctgtggctggaagaccagccgcagggttggctggccgtctggaccggggccagcgcgatcttcgacctgcaccgcatcgagcgcctgcaccaggcctgggagcggcgcctgctggcgaatgccggcgaacctatttcgaaacgcatgtcgccggagggctgcaacgcttcctgacgaccccgagcctcccacggagaacagcgatggaacgaacagctcccagtctcaccggtcgcggcttcgcccggccgcgcaatctcagcccgcgcagcagcgaggcgctggtgcggcgcccggcggcggagcgcgacggcctgccgctgctgatcgaggcacaggctcccggcctgtccctggccgactggattcgcgagcagggccagtccctgcacgacgacctgaacctggctggcggcctgttgctgagaggcttcgaggtcgactcggcggagcgcttccgcgcagccgccgctgccttcgccccgcaactgctcgactacaaggagcgttcctcgccgcgtagccaggtcagcggcgaggtctacacctccaccgagcatccggtggaccagccgatcttcctgcataacgagcagtcctataccgccgactggccgctgtacatcatgttccattgccaggtcgcgccgctcgagggcggcgccactccggtggcggccaaccggctggtgctccgccacctgccggacgaattgctggaacgcttcgggcgcctgggcatcctctacgtgcgcaactaccgcgccggcctcggcctgtcctggcgcgaagcgttccagaccgacagccgcgccgaggtcgaggcgttctgcgctgagcaccggatcgcccatgcctggatcggcgacgagcacctgcgcacctggcagaggcgcgcggcgttccaacgccacccgtataccggcgagcgcctgtggttcaaccacggcatgttcttccatgccaccagtctcgagccgggcctgcgcgatgcgctgctgcgcagcgtcgccgaggaagacctgccgtaccagacctactacggcgatggcagcccgatcgaggcgcagaccctggcgaccatccgcagcgccatagaccgcgagacgcggcgcttcgactggcgcgtgggcgacgtgctgatcctcgacaacatgctcgcccagcacggccgcgagccgttccgcgggccgcgacggatcctcaccatcatgtccacgccgtattccagcctggcgcccgccgacgttccgccgacaccttcgcgcctggcgctcggaggtgccgcatgagcgcctcgttcagcgcgccgcgcctgcgcccccggcagctctcggccggcgacctggtggaggaaagcctgctcgacccggccaacgactacctgcgcatcgtccgcgcgcgccagccgggcatggacctgcggcaatggatcgccgccgccggcgcagggctgcgcgacagcctgctgcggcatggcggcatcctgtttcgtggcttcgcggtagacggagcggagggcttctcccaggcggtacaaagcttttcgccgaacatgctcgactacctggagcgcgcggcggcacgccaggaagtggcgcaccgggtgttcacctccaccgagttctcgccggacggctggattccgccgcaccacgagatgtcctactcgcacaactggccgagctatatccacttctactgccagacaccgcccgccacccagggccgcacgcccctggccgacgagcgccgggtcagcgctcggatacccgaggcgatcaggcagcgcttcctccgccatggggtgtgctacgtgcgcaactacgggccggagatcgacctgacctggcaggaaggcttccagaccgacagtcgcgccgaggtcgaggcctactgccggcagaccggtacccaatggacctggctcgacgaccagcgcctgaatacccgccaggtacgccaggcgatggtgcgccacccgctcagcggcgagacgctgtggttcaaccacgcgcacatgttccatgtctccaacatgccgccggccctggcccgggccttgctcgacgaggtcggcgaacagggcctgccgcgcaacgcctactacggcgacggcagcccgatcgaggcggaggtgctggacaccatccgcgccgcctaccgcgaggaaacccgcgccttcgcctgggagcgcggcgatgtcctgatgctcgacaacttcatcagcgtccacggccgcgagccgtacaccggcgagcgcaaggtgctggtggcgatgaccgacctgcatgtccaccaaccctgaacccgtgcgagggatagccatgagtgcgtcagaagacctgcaatccgctgtgcaaccggccgcgagcgaagcgctcgaaggattcccgctgtctcccttgcagacccgcgcctggcgccgccatgccgagcggccggaaaatacggttgtcggcgtgcgcctgcacgccccggccgatcccgtggcgacgctggagcggctgcgccgggcgctggacggcgaggcgcaactgcgcgtggcctaccggacgatgccgggcatgagcctgccggtgcaggtactggatgggcgcgcggccgatctgctggtcgagcgcctgccgggagatggcgactgggccggacgcttcgcgcgcgaaagcgcgcgtctcgccgcttcgcccctgggcggggaaggccagccggtactggcgctcggcctgctgctggacgccgccggagagacgctccaggggctgttgctggcggcgccggcgttcgtcgtcgatgcggccagcctggtggcgctgctgcgccgcggcctggggccggccggccaggcgagcgcggacgagggagacgaggcgctgctgttccagcatttctccgagtgggccaacgaggcgctggccggcgaagacggcgaaagcgccagcggttactggcgagagcaggcggccgttgcggcggagagtccgctggcgctggcggacgacctgggcgaaggcgagtggacggcgcggcgcctgctgccgcgcgcgctgctcgaacgcctggccgccaacggcttgccggaggcggccgccctgctggcctggacccaggtcgccgggcagttccagggcgacgagggactccctctggaaatggcgcgactggtctcggggcgcctgttcaacgagttcgccgagctggccggaccgttcgccggggtcgcgccgctgtgcctggagaatgtccgcgcgggcagcgtcggcgagcggctcgacgccctccaggcggcgatcctcgcccaggaggaggcagcggccctgcgcgatccctttgcccccgactggccgctcgccgagttgggcttcgcctggctggcgggcgaactggatggcgccggggtggccgagctggattgccgtcagccgccgctgggcgggttcctcgagttgcaggtgctgccccacggcgaaggccggctggccagcctgcgggtccgccgcgaccatgacggaacgctggccgggcgcttgctcgacgcctgggtcgaatgcctggaaagcatcgccgccgacaggcaactgccactggccgggctgccgttgatcggcgcggccgagcgcgagcgctaccaggcctggcagggcgagcgcgtggagcccgcgccggtggaatccctggtggccgcgttcgatctgcgcgccgccctgcagccgcaggcgccggcgttgctggatgcccacggcagcctggatttcgccacgctgcgcgcgcgcagcgaagcggtcgccgaagcgctgctggctgccggcgtgcggcccggccaggcggtggcggtgatgaccgggcgcaaccgcgaggcgatcgtcgccctgctcggggtgatgcgcgcggcggcggtgtacaccccggtcaatccggagtttccggcggcgcgggtggagcggatgcgcgaagcgggcgggatcgtcttcgcccttgccgatgccgagtgcgccgggcgcgcccgcgaggccttcgccggggcctgcctggacctgtcgacgctgccgcttgccggcagcggcatgagcctgccggcgccgggcgggcgcgatgcggcctacatgatcttcacctcgggcaccagcggccagcccaaaggcgtggtggtcgagcacgccagcgcgctcaacctgtcccaggccctggcgcgcacggtatacgcgaacgtggtgggcgagggcctgcgggtgacggtcaacgcgccgttctccttcgactcctcgatcaagcagattctccagttgctctccggccattgcctggtcctggtgccgcaggaggtgcgcagcgatccgcagcggatgctggggttcctcgaagaacggcgcatcgacgtgctcgactgcaccccgtcgctgttccgcctgctgctccaggccggcctcgacgatgcccacccggcgctgcccgggcgcatcctggtagggggcgagcgcttcgacgaagcgtcctgggaggtcgccgccggctggcgccgctgccaggtgttcaatctctacggtcctaccgaagccacggtgaacgccagcctggcgcgggtcgccgagcatgcgcggccgaccatcggccgcgccctggccaacgtcgatctgcatgtggtcgatggcctcggtcgtcgcaagacccgtggcgccagcggcgaactatggatcggcggcgccggggtggcgcgcggctatgccggcgacgccggcgaggcggccgggcgcttcctcgaggagggctggccgggcagcggccgcctgtaccgcagcggcgacctggtgcgctggcgcgccgacggttgcctggagttcctcgggcggatcgacgaacaggtgaagatcaacggctaccgcatcgaactgggcgagatccgcagcgcgttgctggaacacccggcagtgggcgaggcggcggtactcaccgacgaggccgatgcggccgagccgggcgcggatcgccggatcgtcgccttcgtcatcgccgccggggagaccgcggacgagtcctggctggaagtcgacctgcccagcgggcaccgggtcgccggactgaacctcaacgaaaccgagtacgtctaccaggaaatcttcgtcgacgaggtctacagccgcgacggcatcgtcctgccgccggacgcggtggtcctcgacgtcggtgccaacatcggcctgttttcgctgtacatcgccagccgcgcgccgcgcgcgcgagtggtcgccttcgagccgctggcaccgatccgccggcgcctggaggccaacctcggacgctacgcaccgcaggtcgaggtattcggcatcggcctgtccgacgccgagcgcgaagaaaccttcacctactatccgggctactcgaccttctccgggatcgccgagtacgccgacgccagcggcgaacgcgacgtcatccgacgctacctgagcaaccagggcgaggagggcggggccaacctgctgctggacaacatcgacgaaatcctcgacgaccgcctgcgcgccgaagcccaccgctgccgcctgcgccgcctcgaccaggtgatcggcgaactgggcctggagcgtatcgacctgctgaagatcgacgtgcagcgcgcggaaatggatgtgctgctcggtctcgacgatgcggcgctggccaaggtccggcagatcgtcctggaggtccatgacaagcgcgacggtgccaccgccggccgcgccgatgccttgagcgaccttttgcgccgccatggcttcgaggtgagcatccgtcaggacgcgctgctggagggtaccgaccgttacaactgctacgcggtgcgcccgggctatgccgagtcgctggctgagcgcatcgactggcgcgcgctcgcgccgcgccccgccgcggccctcggcggcgagctgagcgagcaggccctgcgtggcttcctcgaggcgcgcctgccggcctacatgctgccgagccggatcgcccgggtcgaacgcctgccgctgaccgccgaaggcaagctcgaccgtcgcgcgctgttggcggcgctggccgccgaggcggccgcgcagaccctggaagcgccggccaatgccaccgaggcggccctgctggagatctggaagagcgtgctgaaacgcccggcgatcggcgtcagcgacaatttcttccaggtcggcggcgactccatccgcctgatccagatgcaggtcatggcgcgcgaggcggggcttgcctttaccctgcgcgacgtgttcaaccaccagagcatccgcgaactggcgcgcctgctggccgctccggcgagtccggcggatgcggccgcgagctcggcgccgcagacgctggagccgttcgccctgttgtcggcggcggaacgcaagcgcctgccggaggggctcgacgacgcctatccgatgaccagcctgcaacagggcatgctcctgcaaagcgaggccagcggcgatccacggctgttgcacaacgtcgtcctgcacgaggtgcatggacgcctggacagcgagttgctggcgcgcgcctgggcgatcctgatcggccgccacgcgatcctgcgtaccggcttcgacctgcacggtggccaggttcccctgcaatgggtccacccggccacggcggtcgccgccgaggtgccggtgcacgacctgtgtggcctcgatggggaaacacggcgcctgcgcctgcgtgcctggatcgaggaagagcaggccaccccgttcgactggagccgcccaccgctggtgcgcctcgccgcgctggcgctggacgagcggcgcttcgccctgggcgtcgccgaacaccatagcgtgctggacggctggagcctgcaaagcctggtggacgagctgctggcggtctacgccgaccttctcgccggtgtcgtcgcgcgggaagcggaagcgcccgcggtaggcttccgcgactacgtggcgctggagcgtgaggccgaggccaacgccgcctcggcgctgttctggctcgactacctggccggcgcccgctaccggccgttgcccggcctggcggaggagggaccccggcgcatggcggcggtccgcgtggacgtgccggccgacagcctgtcgcgcttgcgcgccctggccgaacgcagcggcttgcccttgcgttcgttgttgctggcggcgcatggccgagcgttgtgccgcttcagcgatgccgatgaagtagtcaccggcttcgtcagccacgggcgccccgaggagccgggagcggaccgcctgctcggcctgttcctgaacaccctgccgtgccggctgtcggcttccgtcgatctgctcgacagcgcccgtcgcgcattcgactacgagcgcgcgagcctggaacatcggcgccatccgctggcggcgattcgcaggcgcaaccgcgagttgcgcctggacagcctgttcaacttcgtcgacttccaccaggacgacgccgcgccggcggcgggagtaaggcacggcggcatcctcgaccaggtggtggtggacgtcgacgtgccgctggcggtggacttcgaggtggccggcgagcgcctcgaggtgggcttccagtacgccgccggacgtttccccgccgagcgcgccgaggcactggccggcgcctaccgcgaggcgttgctggcgctgctcggagacccggtgcagccgcccgcggcggcccaggccgaggacagcgtggagctgcggcgggtgctcaaggtgttgtcccgggtgctcggccggccgctggcggccgaccagggcttcgccagcgccggcgggcattcgctgctgggcgtgcaggcgatcgccgaattgcgccggctgaccggcaggcaactgagcctggggctgttgcagggcgatccggatgcccgcgaagtggtgcgccgctgccatgccgccgacgcgccgccgttgccgcccgccaccgagcgcgcccgggccctgtggttgcagcgcagcgggagcgcgcagccgcgcctgcgcctgatcgcgctgccgcccgcgggcggcaacgccggcactttccgtggttgggacgcgcgcctgccggcggacgtggagctgctggcgatccagtatccggggcgccaggaacgccaggacgagccattcgtcaccgatgtagaggccatgctctgtgccatcgacgacgcgctcctgccattgctcgaccgtccgttcgccctgatcggcgccagcctcggcggcatgctcgcctacgaactggcggcacgcctggaaagcctgcacggcctgcgcgccaggcagttgttcgtgatcagcagccgcgctccggggccggacctggaatacccgcgcttccatgcgatgggcgacgccgagttgctgcgaaccctgcgcgagtacgacgtgctgccgctggaagtgctcgacgacccggagctgcgcgagatcagcctggccaccctgcgcgccgattcgcgcctggccgccgactatcgctaccgcccgcgcgagccgctggccataccgatcaccgcgatcctcggcgagcaggacccgggcgtctccagggtggccatcgacggctggcggcggcacgccagccgctacgagctggagaccctggccggcggccacggcctggtggtgacggcggcggaggaggtctgcgcgatcctgcggcagcgcctggcgcccgatgtgcctggcggcgtgccggcgaacctggcaacctgaaccgccggcccctgccgcccgcctggcggcaggggccggtgccgtccgtcttcattcgaggttgcccatggttctgcgcgaatacacccaacgccaccggctcgacgccgtcgccccggccgactaccaccgccatctgccggagcaggtcgcgcgcggcctgccttccgccgagctggtggtgttccgcgtcgccgacgagcattccgacaccgcggcgttcagcgcacgctacggctttggcctggaggactgcgccaacaccctggtcctgcgctacaagcgcgacggcgccgaaggctatgccgcggtggtcaacctgggctcgcggcggctcgacgtgaacggcgcggtcaaggcgctgctcggggcccgccggctgtccttcgccgcccgcgaggtcgccaccgagctgaccggcatgcagttcggcggcatcaccgcgttcggcttgcccgaaggcatgccgctgctggtcgacgcggcggtcttcgaacggccgttggtggtgatgggcgccggggtccgcgagaccaagctgctgctgtccccggcactgctgaaagaccttcccggagtggtggtcgccgaactcagcgaagccggttgaacccggcgcggagcatcgccgccgcggctctgccaattgtggtaggtgaagccttccgccgtctctgcaaccatgcccccgccctgatcgcgacaaacgccggaatgccccgtggtagacgctcgcgcctgttttttctaagcgttcgcggcggccacggcgcggttcgtcggacagcccctccggatgcgtttcctaccttcatccgaggagcggtaaatgatcaggatcgacttttcccagttgcaccaggcccgcgaagatgccgcggcggccatgccgagcatcgccggcaagaagattctcatgggcttctggcacaactggccggccggcgccgccgacggctaccagcagggctcgttcgccaacatcgcgctggaagacgtgccgagcgagtacaacgtggtcgccgtggccttcatgaaagggcgcggcatcccgaccttccagccatacaacctgtccgacgcggagtttcgccgccaggtcggcgtgctcaacgcccagggccgcgcggtgctgatttcgctggggggcgccgacgcgcacatcgagttgcacgccgggcaggagcaggcgctggccgccgagatcgtccgcctggtggaaacctacggtttcgacggcctggacatcgacctcgagcagagcgccatcgacctggccgacaaccagcgggtgctgccggcggccctcaagctggtgcgcgagcactacgccgggcagggcaagcacttcatcgtcagcatggccccggagttcccctatctgcacaagaacggcaagtacgtgccttatctgcaggccctggaaggcgtctacgacttcatcgcgccgcagtactacaaccagggcggcgacggcctgtgggtccaggaggcgaacggcggcaagggcgcctggatcgcgcagaacaacgacgcgatgaaagaagacttcctctactacctcaccgagagcctggccaccggcagccgcgacttcgtgcggatcccggcgcagcgcctggccatcggcctgccgagcaacgtcgatgcggcggctaccggctacgtgatcgatcccgccgcggtgagcaacgcgtttcgccgcctggaagccgccggtcacgcgatcaagggcctgatgacctggtcggtgaactgggacgatggcctgaacaagcgcggcgagcgctacaactgggagttccgcaagcgctacgccagcctcatccatgacggcgagggcggcgaccagcgcccggcggcgccgcagggcctgcgtctgctggagcgcggcgagaccagcctggtgctggcctggaacgcctccagcgggcagcgtccgatcgattactacagcctctatcgcgacggcgccatggttggccagagcgccgcgctgggttccaccgacagcggcctgacggcggacacccgctacagctatttcgtcaccgccaccgatacccagggcaaccagtcgctgcccagcgaaggcctggaggtcagcaccagcggcggggcggtggatccgcaattcccgcaatggcgggagaaccaggcctatcgggtcgacgatggggtgacctacgaggggctgcgctatctctgcctgcaggcgcacacctccaacagcggctggacgccgccggtagccttcaccctctggcggccgctgcgctgagggggcgggccggtccgcgctgcgggccggtcctttggccggcgagagccacgcacgggtggcgccatatccatatgcgttttcggtatttccgcttgatcgttcatggcgtttaccatcacagcataacttgttataacaagtgtccgagccactccgacaagcgaatccgaccatgggcaaactgctcccgctttctcccgtgccgctgtacagccagctcaaggagctgctgcgcgggcgcatcctcgacggcgtctacccgccgctcagccgcatgccctcggagaacgagctgggcaaggccttcgacgtcagccgcatcaccgtgcgccaggcgctcggcgacctgcagaaggaagggctgatcttcaagatccacggcaagggcaccttcgtcgcccggccgaaggcgttccagaacgtcagcaccctgcaaggcctgggcgagtccatgacgcagatgggctacgaggtcatcaaccgcctgcatggcctgcgctacgtgccggccggcgcgcgggtggccgagcgcctgcgggtggaagagggcagccctgtgtgcgagatcaagcgggtgcggctggtcaaccgcgagccggtttcgctggaagtcacctacctgccgcaggcgctcggcgagcgcctggagaaggccgacctggtgacccgcgacatcttcctgatcctcgagaacgattgcggcattcccctcggccatgccgacctggccatcgacgcggtgctcgccgatgccgacctgacccgcgccctggcggtcgaggagggcgcgccgatcatgcgtatcgagcgcctgacccatgccgccgacggcgcgccgctggacttcgaatacctctactaccgcggcgacgctttccagtatcgcctgcgcatcgatcggcagaagggagagcgggcatgaacaccctggagcaggaatacgacatcgtggtgatcggcggcggcaccgccgggccgatggcggcgatcaaggccaaggagcacgaccgcgaactgcgcgtgctgctggtggacaaggccaacgtcaagcgcagcggcgccatcagcatgggcatggacgggttgaacaacgccatcgtccccggccacgccacggccgagcagtacacccgggaaatcaccgtggccaacgacggcatcgtcaaccaggcggcggtatacgcctatgccagccacagcttcgagaccctgcggcagctggatcgctggggcgtcaggttcgaaaaggacgagaccggcgactatgcggtgaagaaggtccaccacatgggcgcctatgtgctgccgatgccggaagggcacgacatcaagaaggtgctctaccgccagctcaagcgtgcgcggatccccatcgccaaccgcctggtctgcacccgcctgctcaccgatgccgagggcgcggtgaacggcgtactcggtttcgactgccgcagcggcgacttccatgtgatccgcgccaaggcggtgatcctttgctgcggcgcggcgggccgcctgggcctgccgtcctcgggctacctgatgggtacctacgagaacccgaccaacgccggcgacggctacgccatggcctatcatgccggcgccgagctggccaacctggaatgcttccagatcaacccgctgatcaaggactacaacggcccggcctgtgcctacgtcaccggcccgctgggtggctataccgccaacgccaggggtgagcgcttcatcgaatgcgactactggagcgggcagatgatgtgggagttccaccaggaactcgaaggcggcaatggcccggtgttcctcaagctcgaccacctggcggaggaaaccatccagaccatcgaggacatcctccatggcaacgaacgccccagtcgcgggcagttccacgccgggcgcggcaccgactaccgccagcagatggtcgagatgcacatttccgagatcggcttctgctccggccactcggcctccggcgtgtgggtcaacgagaaggccgagaccagcgtgaagggcctctacgcagccggcgacatggccgcggtgccgcacaactacatgctcggcgccttcacctatggctggttcgccgggcgcaacgccgccgaatacgtcgccgggcgcgccttcagcgcggtcgacagcgcccaggtcgagcgcgagcgtgcgcggatcgaggcgccgctgctgcgcgagcatggcctgccggcggcgcaggtggagtacaagctgcgccggctggtcaacgactacctgcaaccgcccaaggtgacccgcaagatggaattgggcctgcaacgcatccaggccatcgccgaggatctggagcggatcaaggcggacaacccccacgagctgatgcgcgccctggaagtcagcgttatccgcgattgcgcggagatggccgcgcgcgcctcgctgttccgcaccgagagccgctggggcctgtaccaccaccgggtggactatccgcggcgcgacgacgctgcctggttctgccacgcgcacctgaagaaggacgagcagggacgcatggccagcttcaggaaaccggtcgaaccctacctgttcgccatcgacgagggcgaacagcaggcctaccagcgcctgcggctgaggaacgacgccgcctagggccccacgccccggcgtagtaccgctagacaccgagcccgccgccacgaaagcgggccagatcgaaccacgaggaccgcgtgccatggcctaccgaccccaggacatcttcttccgcagcagcgccccggtgaccatcgacgaagaccgctgcatcgccgacaagggctgcaccgtctgcgtcgaggtctgcccgatggacctgctggccatcgatccgacgacccgcaaggcctacatggcctacgacgagtgctggtactgcatgccttgcgaaaaggactgcccgaccggcgcggtgaaggtcgagattccctacctgctgcgctgacgcccgctcccggcaagcgaggcagaacccgccatccggccactcccggacgccactctgaaacacccctcgtttcccaccaccgtccgggtggcggagacgattcccatgaccatgattcgaggggaatccccatgcgactgcgtgcaatcctggccagcctggcgctggccctgacttccctgggtgcccaggcggaaaccatccgcgtggccatcggcactcaggacaccaccatcaactgcgccgccggcgggctgctgatccgcgagctgggcctgctggagaaatacctgccgcgcgagggccgctacaaggatgcggactaccgggtggagtggaagaacttcaccagtggcgcaccgctgaccaacgagatggtcgccggcaagctcgacttcggcgccatggccgactttcccggcaccttcaacggcgtggccttcgccgccgccggcaagcgcagcctgttcatcagcgtgctgtccggcagcacccgtggcagcggcaacggcatcgtggtaccgagcggctcgccggtgcagtcgctggccgaactgaaaggccagaccatctccgtaccgttcgcctccaccgcccatggcatgctgctgcgcgcggtggcggcgcaaggctgggacccgcagcgcgacgtgaccatcatcgcccagccgccggaaatcgccggttcggccttgcaggcgaacaagattgccgcccatgccgacttcgtacccttcgccgagctgttccccaatcgcggcttcgcccgcaagatctacgacggttcccaggccaacgcgccgaccttccatggcgcgctggtggacgccgcctacgccgagcgctatccggaggtggtggtggcctacctgcgggcgagcatcgaagccaatcgactgctggccgccgaaccggagaaatacagcgagctgatcgagaaggtcaccggcatcgaggccgaggtcaattacctgttccacggtccgctcggcctgcagacccgcgaccaggcctggaaacccgaataccgccaggcgctggcgacctccatcgacaccctgaagctgctgaagaaggccgaccgtgggctggacgtcgagcgtttcgtcgacgaacgctacatccgcgaggcctaccgtcaggccgggctggactaccaggcggcgctggcagactacgcaccgtcgccgctgcgcgccagcgacgcgcgcagcggccggccgatcgaggagttcgaacgggtagcgcagatctgggtgaagggcgaggccagggtgcgccattacgcttcgccggagtcggccctggccgatcttgccgagctgaaggcgcagggcaaggcgattcgtgcgatctacgcccaggatcgtgacagcgggatcaagctgctggccaaccaggcgtggttcgtccgcgacggcgagggtcgcctcaacgccttcctgctccgcgagcaggcccaggactatgcccgccgccatggcggcgaggtacgcgactttgccgccgccagccagcaggcgctggcgctccgctgaggcgggcgtcttcggagttcgcccatgagttcgcttccgatctcccgaccctggcgctgggccacccgcgccgcttcgctggcggcctgcctggcgttctggcagctcgccgccggtctgcaactgaatctgggcctggtgaccttcgccaacgtgccgacgcccggtgcggtgttgctggcggcctgcaacctggcccagtccagcgtgctcctggcgcacctcggcgccagtctggcgcgggtcttcgccggctatctgctggccgccgcgctgggcatcgccctcggcctggcgatcggccgctcggcctgggccgaggccttgctgctgccgccgctggaagtgctgcggccgatcccggcggtggcctggattcccctggcgatcctgatgttcccttcgtcggaggcctcgatgatcttcattaccttcaccggcgcgctgttcccgatcctgctcaataccgtgcatggcgtggaggcgctcgatccgcgcctgctggcttcggcgcgcagcctgggggcggggcgccgggcgctgctgcgcgaggtgctgctgcccggcgccggaccgggcatcttcaccggcctggcgatcggcatgggcacctcctggttctgcctggtgaccgccgagatgatctccgggcaatggggactgggttactacacctgggcttcctacaacatccagaactacgacgaggtggtggtcggcatgctgctcatcggcctcttcggcatgggcagcagtgggttggtgaagcgcgtcggcgcgtcgctgacgccctggtacgcggcgggaggcaaggtccgatgacgacggccggcaacagcctggggcgcatccagatccgcgacctgagcatccgcctggggcaggggagcgaagccttcgaggcggtccgcgatctgagcctggaggcgcggccgggcgagttcgtctgcctgctcgggccttcgggatgcggcaagtcgaccctgctcggcgccctggccggccacctgcggccaagcgccggcagcgtgagggtcgacggccggagcgtggaaggaccttcgccgcagcgtggcatggtattccagcagcacaccctgttcccctggcggcgggtccgcgacaacgtcgccttcggcctgaagatgcagggcctggcccgcgccgagcgcaaccggcgcgccatggagatgctcggactggtggggctggcggacttcgccgggcgctggcccggccaactgtccgggggtatgcagcagcgcgtggagatcgcccgggtgctggtcaaccggccgcgcctgctgctgatggacgagcccttcggcgccctcgacgcgcagacccggctgaagatgcagaccttgctgctggacgtatgggcgcgggtccgcaccacggtgctgttcgtcacccacgacatcgacgaggccctgtacctggcggacagggtgctggtgatgagcccccgtccgggacggatcatcgccgacctggcgctggacttcccgcgcccgcgcgacacccggctggtgaccagcgccgacttcgtgcgcctgaaacgccactgcctggaactgctcgaccacgacgacggccgccagttgccgcgcctgaccccgctcggcttgccgccgggcatcaccccggaccgactgcggatcgccatatgacctgtaaaaacgccaccctgcccgaaatcctcgaactgtcgccgcgcctggaggacgccgaccccggagtacgccgcctggcgctgatcgaactggccgacctggagctgccggaggcgctgccgttgctggttgcggccctgcgcggcgatcccgaccccggcgtgcgcggcgaggccgcgcgcctgctggaggcctgggaggaagacgcggtggtcgatgcgctctgtgcggccctggccgatccggtgccggcggtggccgatgccgccgcgcagagccttggcgaactcaaggaaccggccgtcgggcggcgcctgctgccgtggctcgggcatgccgatgccttcgtccgcgccagcgtattgcgtgcgttgcgcgaactgcgcctggaggagagcgccgtgccggccctggccgccctcggcgatccgcaggcggcggtgcgccgcgaggcggtggcggtactcggctggctccgccaccagccggccctggccgaactggccaggctggccagcgccgatgtcgacccggaggtacgccgggcggccaccggcgccctcggcctgagccgcgaggcgacggtgctgccggcgctctgcgcggcgctggcggacgctcaatggcaggttcgcgaagaggcggcgacgacccttggcaagctgggccgggaggaggccggcgagccgctgctgaaggccctggcggacgactactggcaggtccgcctgcgcgccgcgcgggcgctcgggcgcttgcgccaccgcccggcgcgggaggcgctggaagcattgctcggccatcccatcggcaatctgcgcaaggaggccgccctggccctcggcgaactggcggacccggcctcggcccaggccttgcgggtcgccgaaggcgacggcgatcccgaggtgcgcaaggcggtgcgcatcgccctggcgcaactgcggatgccggcatgacccagccgccgctgcgcctgcgcaattccgccagggacggctggctgatgctcgaatgggcggacggcgcggtcagccggatcgaccatgcgcgcctgcgcgccgcctgtccctgtgcgcaatgccgggcgcagcgcctgcgcggacggatcgtcgcggcggagcagggcgtgcgcctgcgcgatatccgcctgcagggctacggcgtgcagttgctgttcgacgatggtcacgagcgcggtatctacccctggtcctatctgcgcgacgaactctgaggtgggtattgttccgctcccggcaacaacgtgaagcgcgttcatgggtttcagattgttgccaatccctgcgttgtccccgtcccgccacggccaccacccgggtgacccgctcgaaggcccgccgcctggcttcgttgtcgtttccgtaacactgttttccagcctgaaacgtttcagctttacttgcaaagaccttatcattcgcaaattaaccattgttctgcttggctcagatcatgagtcctcttcataaacccttgctccttgcaaggttatcgaggaagtagagcggtcgctgcgtgcggccagtcgaccattcgcaacgaggaagcgttcgcgtgaaatcccatcttctccgcccggccctgcgccccgtggccggcggcctattgtccgcctccctgctgtgcaacgcggtgcacgccgccgaggcgttctcgccgaactcgaaatggatgctcggcgactggggcggcaagcgcaccgagctgctggagaagggctacgacttcaagctggagtacgtcggcgaggcggcggccaacctcgatggcggctatgacgacgacaagaccggacgctacaccgaccagttcgccctgggcgtgcacatggatctggagaagatcctcggctggaaggctaccgagttccagttcaccgtcaccgagcgcaacggcaagaacctttccaacgaccgcatcggcgacccgcgtgccgggcacatcagctcggtgcaggaggtctggggccgcgggcagacctggcggctgacccagctatggctcaagcagcagtacttcgacggcgcgctggacgtgaaattcggccgtttcggcgagggcgaggacttcaacagcttcccctgcgatttccagaacctggccttctgcggctcgcaggtgggcaactgggcggggagcatctggtacaactggccggtcagccagtgggcgttgcgggtgaagtacaacttcgcgccggactggtacgtgcaggtcggcgcctacgagcagaacccgtcgaacctggagaccggcaacggcttcaagatgagcggcagcgggaccaagggcgcgttgctgccggtggagctgatctggcagccgaaggtcggcgccgagcaactgccgggcgagtaccggctgggctactactacagcacggcgaaggccgatgacgtctacgacgacgtcgacggccagccgcaggggctgaccggcaacgacttcaagtcgcgcggcagcaagcatggctggtgggtggtggcgcagcagcaggtcacttcgcacaacggcgatgcctcgcgcgggttgagcctgttcgccaacctgacggtccacgacaaggcgaccaacgtggtggacaactaccagcagctcggggtggtctacaaggggccgttcgacgcgcggccgaaggacgacatcggcctgggcatcgcgcgcatccatgtcaacgacgatgtgaagaagcgccagcgcctggtgaaccaggtgaacggcatcgacgactacgacaacccgctgtaccagccgctgcaggacaccgagtacaacgccgagctgtactacggggtgcatgtgaccgactggctgacggtgcggccgaacctgcaatacatcaagcagccgggcggggtcgacgaggtcgacaacgcgctggtggcggggatcaagatccagacggtgttctaggctgttgcttcggacaaccgcgattcggtcatggccagcggccatttcttcagcgccgcccaacgcggcgcggcgggctgaacagcccggcgtgcagaacgtaataggagagtaagcaatgcctgtcatcaaccccgaagggagtaccggacgatgagcgaaggtaaccgcagtcgatcgcgcctgctgccgagcctgctcggcctgttgatcctgctgtccggcctggcgctgctggccggcggcataaagctggcgagcctgggcggctcgctgtactacctgctggccggcatcggcctggccctgagcggactgttgctgctgctgggcaagcgtgcggcgctaggcctgtacgctctggtgctgttcgccagcaccgtctgggctctgtgggaagtcggcctggactggtggcaactggtgccgcgcctggctctgtggttcgtcttcggcctgctgctctggctaccctggttccgccgcccgctgctggccgacggtccggcgccgctgggcaccgcggcgctgggcgtggcggtggtcctggccggcgccgctgcggtgggcagccagttcaccaatccggggcagatcgtcggtcgcatcgaccgcgacagcggcatgaccagcaccgccccggcgatgccggacggcgactggcaggcctacgggcgcaccgagttcggcgaccgctactcgccgttgaagcagatcaccccggccaacgtcggccagctcgaggaagcctggcgcatccgtaccggcgacctgccgaccgccgacgatccgctcgaactgaccaacgagaacaccccgctgaaggtcaacggcatgctctacgcctgcaccgcgcacagcaaggtgctggccctcgacccggacaccggcgcggaaatctggcgcttcgatccgcagatccagagcccggtaggcttcaagggcttcgcccacatgacttgccgtggcgtctcctactacgacgaagagcagtacgccaggagcgacgtcggcgcgccgccggccgcgctctccgaggccggcaaggcggtcgccgccagttgtccgcggcgcctgttcctgcccaccgccgacgcccgcctgatcgcgatcaacgccgacaacggcaaggtctgcgaggacttcggggtcaagggcgcggtcgacctgacggccggcatcggtccgttcaccccgggcggctactactccacctcgccggcggcggtcacccgcaatctggtgatcatcggcggccacgtcaccgacaacgagtcgaccaacgagccgtccggggtgatccgcgccttcgacgtgcacgacggcaagctggtgtggaactgggacagcggcaacccggacgagaccgagcccctggctcccggcaagttctatacccgcaactcgccgaacatgtggtcgctggccagcgtcgacgagaagctcggccaggtctacctgccgctgggcaaccagatgcccgaccagtggggcggcaaccgcacccccggtgccgagaagttcagcgccggcctggtggccctcgacctgaacaccggcaagctgcgctggaactaccagttcacccaccacgacctgtgggacatggacgtcggcagccagccgaccctgctcgacctgaagaccgccgatggcgtcaagccggcgctgatcgcgccgaccaagcagggcagcctgtacgtgctggaccgccgcgacggcacgccgatcgtgccgatccgcgaagtgccggcgccgcagggcgcggtggagggcgaccataccgcgccgacccaggcgcgttccgacctcaacctgctgcgcccgccgctgaccgagcgcgacatgtggggcagcagcccgttcgaccagatgctctgccgcatccagttccgctcgctgcgctacgagggccagtacaccccgccgtcggagcagggcagcctgatctatccgggcaacgtcggagtgttcaactggggcggggtggcggtcgacccggtgcgccagatcctcttcaccagccccaactacatggccttcgtctcgcagatggtgccgcgcgacaaggtgcccagcggaagcaagcgcgagggcgagaccagcggcgtgcagccgaacaccggcgcgccctacgcggtgatcatgcatccgttcatgtcgcccatcggcctgccgtgccaggcgccgtcctggggtgacgtggcgggtatcgacctgaccaccgccaaggtcgtctggcagcacaagaacggcaccagccgcgacaacaccccggtgccgatcggcctcaccgtcggcgtaccgagcatgggcggctcgatcaccaccgccggcggcgtggccttcctcagcggcacgctcgaccagtacctgcgcgcctacgacgtgaaggacggcaagcagctctggcaggcgcgcctgccggccggcggccaggccacgccgatgagctacaccggcaaggacggtcgccagtacgtgctgatcgtcgctggcggacacggctccttcggtacccgcatgggcgactacatcatcgcctacgccctgcccaggcaatgacccgcccaccgggagcccacagccggctcccggccttccgggcctcggcccggaaggggctttgccaaggggaggcgcgttcccgcccttggcaaagccccttcgataccttgcgacccgcggaaccctgcatgccgtcccgaccccgacccagcttcgtctcccacctgttgcccggctccctggcgctctgcggcctggccatcgcctgcgccgtccagggcgaggagcgacgcagcctcgaacccatggtggtgaccggcagctacaaccccagcgacaccttcgacctgccgttctcggtggatagcatcgagcgtcggcagatcgccgacggccagctcggcatcaacctctccgaagtcctgccgcgggtacctggcctggtggtgcagaaccgccagaactacgctcaggacctgcaaatctcctcgcgcggctacggcgcccgctcggccttcggtatccgcgggctgaagctgctcgccgacggcatcccggccagtacgccggatggccagggccaggccgcgaccctcaacctcgacgtcgccgagcgcatcgaggtactgcgcgggccggcctcgacgatctacggcagcaacgccggcggggtgatccagatgttctcccgcgacggccagggcgccccgcgggtcggcgcggaaacctccgtcggcagcgatggcctgagccgcaaccacctgtacacggaaggcgagggcgacggggtcggtttcctggtggatgcctcgcggatggacaccgacggctaccgcgaccacagcgccgcgcgccgcgaccagaccttcgccaagctgaatttcaggcccgacgccgacagccgcgtggcgctgatctacagcagcctggaacagaacgacactgaagatccgctggggcagacctgggacgcctacaagcacgacccgcgctccgtcaccgccaacgccgagctgtacgacacgcgcaagagcatcgaccaccagcaggccgggatgaactacgagcgctacttcggcgaggcgaccttgcaggtcaacgcctacgtgggcaagcgcagtgtcgtgcagtatctgtcgatccccaggggggtggcctccaacagtcagcgtggcggcggcgtggtggacttcgaccgcgacttccacggtggcaccgtgcgctggctgcaaccggtacgccaggcgccgggcgtgctgaacctgaccgtcggcctcgactacgaccagagccgcgacgaccgtcgcggctaccagaacttcaacggcgaccagctcggcgtgaagggcgagttgcgccgcgacgaggtggacaccgccaccagcctcgatccctacctgcaggcgagctgggccatcgacgcctggaccctgcaggccggggtgcgccacagcaccatgaagatggaggtcgacgaccgctacctgagcaacggcgatgccagcggctcgcggcgctaccggaagaacaccccgtcgttctcggtgatgtacgccttcacccccgacctgcacggctacctcagcgccggcaagggcttcgagactccgacccaggcggagatggcctatgcgccggtggcggcgaacgcgccggacgtcttcaacttcggcctcaagccagccaccagcagccagtacgaagccgggctgaaggcgcgcctgtggggcaatacgcgggtcaacgcggcgatcttccagatccgcaccgaggacgagatcgtcgtcgccagctccctcggcggtcgcaccagctaccagaacgccggcaagaccctgcgtcgcggcttcgaactgggcctggagagcgaactgagcgagcactggaacgccaacctggcctatacccggctatccgccacctacgattcggatttcgaggccggcggcaagaccatcggcaagggcaagcacctgccgggcgtgccggaaagcagcctgttcggcgaactggtgtggaagcccgcggagggcatcagcatgggctgggaaggcatgtaccgcagccaggtctacgtcgaggacagcaacagcgaaaaggccgcgccgagctatgcggtattcaactggcgcacccgcttcgagcagcgcctgggagcctgggccttccaccagctggtgcgcctggacaacctgttcgaccgccagtacgtcggctcggtcatcgtcggcgacggcaaccggcgttactacgaagcggcccccgggctgtcctggtacgcgggagccggggtcgaataccaattctgaagtgccggatgcgcttgttcgcgctacccggccagcccttgtcagcgtcgtcaattccgattactgtatggatgtacagtaatcggaaatcgcctgcctgcgcgacaaggagcaccgatcatgagccacaaccttgccgaactgccgctgtcccgacgccgcgccctggagcgcgagaaacaggcctgcctgcgcctccacctgtcccgcaatcgtgccagcgaacgcctggagcgcgccgtgcgcgacgaagtcgagcgcctgctgggtgcccgcgaacgccagggggccggctggccggagtgggtcagcgcggagctctgcgtggcggacgacccgctcttcgtgcgcaaggtggtggcgcgcctgaaagccgcggtggactggcaacgccagcgcgcagcctgagcgttgctcgcttcaggccccgctgccgtcgctcccgggcgcgcgatgatgttgcagggcgcgctggcgatggccggcgaggatgtaccggtagatcagtcgtgcgagtggctccagctccattttctggccgttcagcgcggcgccgcacagcgccagcttgacccgcttgccgccggccaccgcgcgggcttcggggcgggcgaaagcccgcgggtcgaaacgggcatggctgtcgaagcgcggtgccgtgcaatcgaaggtggtcgcgaaggtgagttccagccagcgcccgcgctcgatctccagcgactggaaggtgtacatcggcacctgcggcgcgttggcgaaggcgatgctctccggcgtcagggtgagcgcgacctggccgtggcgccggtagaggaacacgcccgccaggcaggcgtacaggccgccgcccagcagcagcgcggctggcagccagaacagccattggccactggccaggcgccaggcgttgggcagcgaagcgagccagagaccggtggcgccagccaccaggccagcgagcagggcaacgcaggcggtgccccgcgagacctcgcggatctcgcagcgggcttccagcggcggcagttcgtcgagggtttcgtcagtttcttgcatggggattctcacaggtcttgccgagcaggtcggcgctgagcgctcggctcaacgccaggggggcgccgaaccagacgcccagcgcctggctcggcggtcgtgtcggaacggcccggccggcggtcccggcccaggtgcgttcgaagctctctcccagcgccgtgcagcgcaggcccagcggagggtgggtatcctgcggatggacctggagtccctccgccccgggggccggtgcttccaggccggactggcccaggtagacgtggatggcgtccaccaggttgtccggcgcgcgcgccggagcgagcaggcagtgttcgaggaacgcccgtatcggcgcgccggccgccgcgctgcgcagcagggccgaggccatcgccggcgcaccggccagttgagcggcgcggcggtcggcggcgaattcgcgcaggcggctccagtggttcacggcgaggccgaaacgttcgaggaagtacccggccaacagtcgcgccggttccagtgccgcacgttcgaagacgttggcttcctgctcctcgatggcggccagttggctcgcggcgccctggtagatcggcaggaagtgcaggctgtaatgggcgtcgcggccggcgaagtgggccagttcgtgagcgatcactgcactcagttcggcgcggtccagcaggcccagcaacggtagcgagaggtataggctgcgtccttgcagatgctcgccggaaggttgcaggcagacgcggttggcggtcacgtagaagccgtcgcagagacctaccaacaggtgctgcggggctggcgtgtcgaggcgcgccgccagctcgcgcagtagcgtccagagttccggtgcatcctcttcgcccagccggcggccgatgacatccagggccggcgccgggcgcagtcgcaagcggctgatcttcgccagcatttgccacgccgacgccagcaggccgagaaggatcagcgccacgctcagttgagtgcgtccttcgctgaccggaacctggccgacccgccatagcccgaggatctcgaacgttccggcacaggccagggccagggcgagcaggccgatctgggcgaggagcaggcagggcagcaggcgtcggcccagctcgaaccacaggagcaggcagcgacgcgagcgcagtgcgctgcgtgcggcgccggcgatgccggccagggagacggctcccaatacggcgaccagcgccgccaggcaggctccgctatcggcgaggacggcggcgaagcgattcaggcgctgtgcgcttcgtgtgtcggcgagtcgctcgtcgagccgcgccagggccaggtcgcgcacataggcccggccgtccacccggacgctggccctcggcggcagcgcccgcgcttcggcgagcgcgcgctcgacccgctgctgcgcggcgcccagtcgctcggcctgctgctcggcgcgccaggactgccaggcgccgagccccgccagcagcgctggaaccagcaccaggcaaagcagcagccttcgcggatggaccgtgcccttcactcagccctggctgcgcagttgttgcaggtagcgctgggcgtgggcggcctggatgtaggcgtcgaggatcgccgccatgtcgtcgcagtccagcttcttgccatcgctctgcaggccggccgacatgatggtgatgcgcgggtccttgcctttgaaggccatggcctgggaggcgaacacctggcgtacggcgcgatgggtcggcagcggagtttcgggccgcaggtggagggtctgggtggtttgcagcatgtcggccttgacgctgaaatcgatgacgtcggccagctcgaccggagccgacaggctgtcggcccagagctgggtacgggtcaggcgcatgaagggggtcttgccggagttgcgatgctggtagccgaggaacagcccgaacaggccgagcagcaagccgacgacgccgacccccggcttgccctgggagaaccacatgccggtcatgatgaagggcacgatgctcagcagcggacccagcaccacgtacttgcgggtattggtgaactcggtggccggcggtacgttggcgatcacccgctccaggtgggcgatgacctcggcggtcttcgcctggttcagctcttcgtgttcggcaccgagggtttcggcgaggttggagacgaggtcccggggttcctggttgctcatggaaatatccttggagttgggagtgaagaggaagcactgggcgggatctcgcccagttggcggagccgggcctgggcgcgggcgatgtccaggtagaggtcgatgacctccgcggcttccagtagcgacaggttgcgaccgttgaggcgccagccgggggacagcaggcgaacccgtgggccgtcccggcattcgctgacggcacgcgcggcgaacggatcgagcgggcgcgtggatggtgccggtagcgccttgccgtgcagttcgaggactatcgcggagaaccagaccccgtcctccaggcgcaggtcggcgacctccagcaggtccagcggcgccgacaggctgcgggcgcgcaggcgcccctggccgaggacgaggaacggcgcgctcctggcgttgcgctgcaggcaggccaggcacatgaggagggcggccgccgccagcaggcacagcgccgccgcctcatggccgggaccggggtggtcgcgcaaggtccaggcgccgccgagcagcagcaggccgagcagggcggacagcggcgccgcgccacgggcggcgccgatgcttatccggttggggacgctggcgacgaagcgccgcaactgcgtggcttcgtcgccccttgtcccggcggggcagggcgtttgcgcgcccggcgggatcaccggctttccccgtggcctgcatcgagcaggcggttgagccactgcgtgtcgtcggcgctgacgatgcgccttgcctgtcgcagcagatcgtcgtcgagcgccagggaaaggtccgcgatccgctggtaggtcggcgggtgactgtcgaaggggtgttccaggcggcgagcgctgtcgtgttcgtccagttccagggagttcccgcgcagatggtcggtcagcgcatgcaccaggttgcgcgtctgcgggctggccagcaggcgttcgatcagtcctgcaagggcgcaggtgcgtagcagcgcgatggcgaagacccgtgcgccggctacccgcgccccgaccttgtcggcggccagttcctggtggcgattccagtgcaggtaggcgcgctcgaagcgatcgaggaagtacagcgcggcccacaggcccggcttgccgagcaggccgacacgcccatcctcgggtgcggcgatgcgttcgatgcgcaggcgcacctgccgctgcaggagcgacagggatgcaccgtgggcggtgtcgccggcggcgaagtggcccagttcgtggccgatgatcgcggcgctttcggcctcgctcatgaccgaggcataggtcagcgggatgtacagggtacgtccctccaacggaatgccgcggggcgccagcaggaccttggcttgggtgacgaagtagcagtgctcgatgccggtgacgacatggtccggtagcggcgctccggcgcggtcggcgatctgtcccagccattgccagaggccgggcgcggcgacgcggtcgagttcgcggccgagcaggtggagcaccggttcctccagcggcagcagttcgccgcgcaggcgccgcagcatgagcaggccgccgaggaacagcagccacagcggcagcgagaagagcagcgcgacgaagccgtggctgtgccaatggctgtagctccacagcgcttcgtagagcaactggctggccagggcggcgaccagcaggccggcgtgcagcgggaccagtcgaccgaggcgccgccaggccggcgcgaggtggccgagcaggtaggcttgcgagcgcatcgagcggcgcccgtcgtattccagtctcgccagcaaggcggccgcgaccagcgccgacgccagcgcgcagagcttgccgatagcggccagccagccgcgcagagccagccaaggatggtcgcggcggatggcctcggcgtcttcggcgaactggtgaagatgaccttcgacgccataggccggacggaacaggtgacggggaatggcgccggcggtgtccgggtcgttgcgcaccgaggcgctccagtcgcgcatgaactgttcgtcgcgcagggtcgagtcgacccggaaggcctgcacggcggaccaggcgtagagcgccaggggaatcaggaagaggaatgcgagcagccttacccgcagcgtatcgtggctcatccgcgtttatttctgctcgaggtagtcggtcaggaatgcctggggctcgcctgcggacgacagcgactcgctataggcgacctgccgcgtctgctgttcgccgggcaggtagagctcgccccagccgtcgcgcacgatcaggatcacatacttgctgccgttcagttcggtggagtagcgactgtccctggcgctcttttccacctttaccttgtggatcaggcggtcccagtcgtggtccagaccttcgacctgcaacagcgcttcgccggccgccgcttcgccgatacgcagggtccagaccttgagcccctgctggccctggtaggccaccaccttgtcggcgactggcggccgcgcctcttcggcctgcgccgtgcaggatccccacgccagtgcgcccatcagcagtgccgcagtccactttgctatcattctcgccccctttggcaacgcgatgtaaaaggggcgcatctattaatacaggcgcgagccacgaacaaccgaggcggccgccgctcacaggaaaagcgtcgtcgcccacaggttcggttcgatcagcgcacggaaccatcctggaaagccgctgcctgaaccggttcagatggttgcgtcccaccgatacctacgccatggaaagctggaatccctaccacgacacggagctctatttcgacgctccttcacccctgagccagtcgcagatcctcgacgcgcgcgaaatgctcggcagcgccaccggtcactaccaggcgcggacggtgcgcccgtcgatgcagtatttcgattgcgacctgagcttcaccgagccgctgcgaacccacaaggtgctgccggaaggcctgtgcatcgtgcagatgttcgacggccagtggcggcacagcgtcgacggcggcgagccttatctctacaacctgggcggtccttcggtgctcggcaccggcgagccgatggaggccttcgatatcctgccggcgggcagccgcgtgcgcctgggcgggctgcggatcgccgccagctatctggaagaggaactggaaaccggcgatggcgccctgcggccgctggcgcggctgaagggcgacggcgcgagctttacccagttgtctcgttgcggcgccatcaccgccctgttcgagcgcctctaccagaatccataccgcggcgccctcggacgcctgcacgaagagagcctgaccctgggcctgctggtggagctggccgcctacctgggcggcgcggaccttcgtcgcgcgcgcaccccacgcgcccagcgcgacctggcccatgaagcgcgccgcctgctggaggcgaacctcggtgagccgccggccagcctcgaactggcgcgccaactgggggtcggcgaaaccaccctgcggcggattttcaagaacgagttcggtcgctcgatgttgcagtacgtccgcgaccggcgtctcgagatcggccggcagatggtccgcgagggtcgctggcagatcgcgcagatagcctatcgcctgggttactccagtccggaaaacttcacccatgcctaccgcgcgcgcttcggccatccgccggggcgcgagtgaggcggacgcggttcagagcgaacgctggtcgacccgcgcggaaagctgctcggcgctttccttgcgctccgaatagcggtccaccaggaagtccgtgcgctcgcgcaggagcagggtgaacttgaacaactcctccatcacgtcgaccacccggtcgtagtagggcgatggcttcatccggcccgcttcgtcgaactccaggtaggccttgggaaccgaggactggttggggatggtgaacatgcgcatccagcgacccagcacgcgcaactggttgaccacgttgaacgactgcgagccgccgcagacctgcatcaccgccagggtcttgccctgggtcgggcgcaccgccccgagtgccaggggaatccagtcgatctgcgccttgaataccgcggacagcgcaccgtggcgctcgggcgagcaccagacctggccttccgaccactgcaccaggtcgcgcaactcgcggaccttgggatgctccaccggtgcatcatcgggcaatggcagcccggaagggtcgaaaatccgcgtttcggcaccgaagcgttcgagcaggcgtgcggcctccagcaccagcaggcggctgaaggagcgctcgcgggtcgagccgtagagcaggaggatgcgcggcctgtgcccggagacggggggcgggtcgccgagcagcgcgggatcgaggttgggtagttgttcggacatgcttcctccggtcagagcgagccgatgcgctccagctcacgcttgagctggtcgcgatccagggtagcgaagggcaggccgaggaaggctcggcaacgctgttcgatgcgtgccagggtggcgtggaacgccgcatcccgcagggcttcgtcgccatccagggcggagggatcggccaggccccaatgggccttcagcgctgcgccgagatacagcgggcaggcttcccccgcggcggcgtcgcaaacggtgatgacgatgtccggcggtgcgccttcgaaggcttcgctgcccttgctgtacaggccgtgggtggcgatgccggcctgttcgagggtcgccaggctgcgcggatgcacccgcccgctgggctggctgccggcgctgcatgcctcgaaacccggcggggccaggtggttgaacatggcttcggaaagaatgctgcggcaactgttggccgtgcacatgaacaggactcgcatgggatgctcctgccgccgtcgccggcggccgtcagatggccaggcgcagggccagggccgaaagggtcgccagcaggaccggcagggtcagcagggcgccgaccctgaagtagtagccccaggtgatgcgcatgcctttgcgcgccagcacgtgcagccagagcagcgtcgccaggctgccgataggggtgatcttcggacccaggtcgcagccgatgacgttggcgtagatcatcgcttcgcgcaccgcgccggcggtgtcgctggcctggatcgacagggcgccgagcagcacgctgggcatgttgttcattaccgacgagagggcggcggaaagcagtccggtacccagcgcggccgcccatacgccgtgctcggccaggcggttcaggagctgcgccaggaggtcggtgagaccggcgttcttcaggccgtagaccaccaggtacatgcccagcgagaagaccacgatctgccagggcgcttcgcgcagcacccgccgggtcgagatcacccgcccgcgcccggccaccgccagcagcagcgccgcacaggccgcggccaccgcgctgacggggacgcccagcggctccagggcgaacagcccggcgagcaggaccagcagcatccagccaccgacgacgaaggtcgcgcggtcgcggatcgccgcccgcggcggcttcaattgctccagcgcatagaccggcggcaggtcgcggcggaaatagaggaacagcaccagcagggaggtcgcgacgctcaccaggtttaccggcagcatgaccgcggcgtactcgccgaagccgagcccgaagtagtcggccgagacgatgttcaccaggttcgagaccaccagcggcaggctggcgctgtcggcgatgaagcccgccgccatgacgaaggccagggtcgccgccgggctgaagcgcagggccagcagcatcgacatcacgatgggcgtgaggatcagcgccgcgccgtcgttggcgaacagcgccgagaccgccgcgccgagcagcacgcagaaggcgaacaggcgccggccgtcgccgccagcccagcgcgcgacgtgcagcgcggcccattcgaagaagccggcctcgtccagcagcaggctgatgacgatcaccgcgatgaaggtggcggtggcattccagacgatgttccagacggtcgggatgtcgcccggcgcgacgctgcccagcgccagggcgagcagggcgccgatgctggcgctccagccgatgccgaggcccctgggctgccagatgaccaggaccagggtgaacaggaagatggcgaaggcgatcagcatggggcggctcgcgctattggcagcaggcggaggcgcgctgcgggcggccgtccatgtcgcgcaggcgcgctgcgtcggcttgcagccagtcgccgttggcccgcagggtcacttgcaggacttcgtggatccaggccggcagcgcagggttcaggcggtaatacacccactggccctggcgacggtcgaggagcagcccggcactgcgcaactgggccaggtggcggctgatcttcggctggctgtcggcgagggcgcacatcagttcgcagacgcacagttcgccctggtcgacgatcagcagggtggcgcgaacgcgcgtctcgtcggccaggcacttgaacacttcggcggggctgagcatcgctgggccttcctggatatatggaaagccgaatatacggatatccgtatgtattgcaagcgcccccgctcccgccggctagcggcgggcggcctggacttcctcgctcggcgtgcgcccgaagtagcgcttgaactcgcggctgaactgcgagggactctcgtagccgacctggttggcggcggtactggcgttcagcccgtcctgcaccatcaggctccaggccttgtacaggcgcacgctcttcaggtactggaggggcgaggtgaaggtcatcgccttgaagttgtggtggaaggtcgacacgctcatgttcgcctcgcgagccagggtgtcgatgtccagcgcactggcgtagtcggtgtggatgcgccgcagggccctggccatgcgcccgtagccgctgtgccggccggccaccgcacgcagggcgttgccctgctcgctgcgcagggcgcggaagatgatctcgcggaccagttgcgggccgaggatatggctgtccagcgggctctgcaggcagcccagcaggcgcatcaccgcatcggccatccccgcgtccagcggtaccgaagccatcggcgcgctgggtgccagctcattgtcgtcgtcgctgccgggagcctcttccatctgtagcagcagttccttcaaggtgccgatatccacgtcgacgctcactcccagcaagggttcggcggcggaggcgtgggtttcgcattcgaacggcaggggcaccgacatcaccaggtagcgttcggcgtcgtagcggtaggtttcgccgccgaggaaaccgatcttctggccctgggcgaggatgcagatgcgcggctcatagaacaccgggctgcgcggataggcctgttcggcgcgcatcaggcgaaccccggggatgcgggtggcgtcgaaacccggttcgtcttgcagggtggcgatcagcgacgccatgtcggtggaagtagtgctcatgccttggctgtttctccaggaggggaggcaaacgtagcaaccccgtgcgcgcctgggcagtggcggcacgcaacatcggcacgaatgggcaaggcttcgacaggaatggacattctgcggcggcgcccatccggcgaacaattgccccccgaacggaccgccgccagcaagccgtcgcggcccgccatcctgcgaagaggacacaccgatgaccctacagatccgcggctacgccgcccagtccgccagcaccccgctgaccgcccatcgcttcgaacgccgcgcgccgcgcgccgacgacctggtgatcgacatcctctactgcggcgtctgccactcggacctccatcaggcgcgcaacgaatggcacaacagcctgtacccgctggtgccgggccacgagatcatcggccgggtcgccagcgtcggcgaggcggtgagcggtttcgcggtcggcgaactggtcggcgtcggctgcatggtcgactcctgccggcactgcgccgcctgctccgagggcctggagcagtattgcgcggaatacccgaccctgacctacaacggccgcgaccgccacgacggcctgccgaccttcggcggctactcggagcgcatcgtggtctcggccaggttcgtcctgcgcattccccaggggctcgatccgaaggcggcggcgccgctgctgtgcgccgggatcacgtcctactcgccactgcgtcactggaaggtcggtcccggcagccgggtggcggtggtcggcctgggcggcctcggtcacatgggcctgaagttcgccagggcgctcggtgccgaggtggccctgttcacccgctcgccgggcaaggaagaggaagcgcggcggctcggcgccgaccaggtgatcctttccaccgacccacagcggatggccgccgtcgccggacgcttcgacctgatcctggacaccgtgccgcaccagcacgacctcaatccctatctggcgaccctcaagcgcgacggcaccctcgtactggtcggcctgctcgagccgctggagccggcggtgcacggtgcgcaactggtgatgggacgccgctcgatcgccggctcggccatcggcggcatcgccgagacccaggaaatgctggatttctgcgcggcccacgggatcgcctgcgacatcgagatgatcgagatccagcagatcaaccaggcctacgagcggatgctggccagcgacgtgaagtatcgcttcgtgatcgacatggcctccctgcagaagtccttctgagacgggccgtcggcgccggtgggctcagcagccctcggcgtcgaccaggaaggtctcgaaacgcacgcttttcgcccccagccgccagacgcccgcgctcagcgggccttgcgcgtcctcccgggcctgccaggcgcgttcgcagtcctcgcgtgaacgccagcaggtgtagttcagcacgtgctggccgtcctcgctggggtgcaggctggcggacaggtagcccgggcagttcctgaagcagcgttccaggcgttgcaggtgcgcgttctgttccagcgccagcgacaactggctggcgggttccacctcgatatcgatgagttgcgcgtagcacggcgaccgctcgctagcggccgggcactgatcgtcggtgcagcagtaggaggaggggatgagcatggcgggttactccgggtgacttgtgtcgagggccggcccagggtaaaacctcaagcaaacttgaggtcaagccaatcatgaagaattcctgcgcatctcgtgaactgagcgtcggcgaactggccaggcgtgccggcgtggcggtctccgccctgcatttctacgaaaccaaggggctgatcagcagccagcgcaacgccggcaaccagcggcgcttcagtcgcgagacgctacgccgggtggtggtgatcaaggtcgcccagcgggtcggcattcccctcgcggagatcgctcgcgccctgcagaccctgccggcggggcgtagccctagcgcggcggactgggcgcgcctgtcggcgcagtggaaggaggatctcaccgagcgcatcgacaagctgctgctgttgcgcgaccaactggacggctgcatcggttgcggctgcctgtcgctccaggcctgcccgttgcgcaaccccggcgaccagctttccgccgaggggccgggagcgcactggctggacgccgagggccgcgagcacgacggctaggcagcggtcagccgtggtgctggcggtcggcgacggccgggctgtcctgcaggttgtccggcgggattgccagggcgcgtagcgatccggccatgatgtcgctgaaggtgggcgccgagaccaggccgccgaagtagccgatcctggtcggcgaatcgatcatcaccgccagcaccagttgcgggtcggacgccggcgccatgccgacgaacagcgaacggtaggacttgtccgcgtagccccggcccgaggccttgcgcgcggtgccgctcttgcccgccacgtggtagcccggcacgcgggcgcggaccacgcccttcgggtcttccaccacggtttgcagcatcgcccggatgcgccgtgcgatctgcgggtccatcgcctggcgcacctggttctgcgggttgtcgcggagcaggctgagtggcaccagcttgccgtcgttggcgaacaccgagtaggcctgggccagctcggcggtgttcaccgccaggctgtagccgaacgacatgctggcggtggcgatgttcgaccatttctcgtggaacggcaggtagcccgggttctcgccggggaagcccagcgacagcggcgcgccgaaaccgacccgaccgagctgttcgaggatcggcttgggcccgatctgcagggcgaccttgctcatgccgatgttcgaggagttgatcagtaccccggtcatggtcagtacgtcgcgccgggcgacgtcgtggatggtgtgcccgtcgatggtcatccagcccggtgccacgctgacttgactgttctcgtcgaacttgccggaggccagcgccgccgacatgctgaacggcttgatcaccgagcccggctcgaaggtatcggtgagggtgcggttgcgcatgaaggccggggcgaagctggcgcggttgttcgggttgtaggaggggaagttggccatcgccaggatctgcccgctcttcgggttcaccaggaccgccgatccggagtgcgcgccgaacttgagcacggccttttccagcgccttgtaggcgatgaactgtagtcgcaggtcgatgctcagggccacgtcctggctggccttgggcgtcttcagcaccttgatgctgttgaccagcgagccgcgcgggttgatcgccacctcgcgtaccccgtccttgccgctcagccagtcgttgaagcccagttcggtgccttcctggccgcggccgtcgatgttgaccaggccgatcaactgcgcggtcagctcggaactggggtagaaacgcttgtattccttgatctggtgtacccccgttatgcccagggccatcacctcgctggcctcgatcggcgacaggccgcgctcgaggtagaggaagcgcttgttcgggttggcctggagctgggccagcagcggcgccgcagggcggtgcagggcgccagccaggcgcggcacctcgtcgaggtgggcggccatttccctggggttgcaccagatcgacgcgacttcggtggataccgccagcggctcgccgttgcggtcggtgatcatgccgcgggtgaccgggatcggcaggtcgcggatcgagcgaaggtcgccctggtcggcgaggaattcgtggtcgtggacctggagatagaccaaccgtccggagacggccagggaggcgaggacgaacagggtgacgacaaggatgaagcggtagtttcggcgttgactgctcatgcaagggcacactggggaagagggagagcggaagcccgtccggggcagtgctgaaacatcctgttgcagttggcaactgtaccgtcacccgccacccgccggtcaagccctttgccgccgtctagagcaccaggcgcatcgcgcagcggctgtcggcggcgaagccgatctcctgctcgtggccgaggatcgcgcgcaggcgctcgccggcttcctgccaggtcagccgctggaagcccaggcgtgcgtagaacggcgcgttccagggcacgtcgcagaaggtcgtcagggtcagcgcccggcagtggctggcgtgggcgtaggtcaccgcgcgctccagcaggcggcggcccaggccctgttgctggtgggcctgggcgatggacaactcggcgatgtgcaactcgtcggcgcagcgttcggcggcgaggaagccgaccggctggccatcggcgtcttccgccagccagtggctgccgcgctcgatcaggcggcgatggaagtccaccccggcgaccccggcgtcggcgatccaggccagctcgggcagcaggcggaagctttccccggctgagcgctcgatggccgggagcagcgcggcgtcctcgtcgcggctggttctgatgcggtagtccattggcttttcactccatgagcaggccgtcgagcagcacgtccagggcctggcaggccctggccaggctctccggcgggtgttcggcgttggcgatacgcagggcggcgtccaccagcgcgccgttgagcagccaggccagggcctcggcgtcggtgcggcggacgcgcccgctgtccatcagttcgcgcagttgcccggtcatcgagcttaggcagcgcagttggctggcctcgctgctggggctgccgaggatggccggggcatcgcgcaggacgatgcgctggatttccgcttccagggccatttccaggtaggcccggttgtaggcacggaagccgctccagaggtcctcgccggcagccaggatggcgccgaggcgaagattcatctcgtcgtcgatctgctgcaccaccgcggccagcaggcctttcttgtcgccgaagtggtgatacagcgcgccgcgggtgaggccggcgctggcggtcagttcgtccatcgaggcgccggcgtagccgttgtcggcgaacgctcggcgcgcggcgtcgatcagcttggcgcgggtttcctcgatcatctcggcgcgaggcttgcgggccatgcgaggtctccgggtggcgaaggggcttcaggataattgacatacgctgcgtatgtctccatgatttttgacatacgcagcgtatgtgaatttcgtcttctcccgtcgtcgccggttccgctggagccggccagccgaggctttccatgagcaacccctatctcgaactgttcgccgcgcccggcgccaagggcttttcagccgccggcctgctggcgcggatgcccctgtcgatgaccggcctgggcatcgtcaccatgctttcccaggtgcatgccgactactggctggccggtaccgtggcggccaccttcgtgttctgcaatgccttgctcgcgccgcaggtatcgcgcctggtggaccgcttcggccagggccgggtgctgctcccggccgcgctggccagcgccctggcgatgagcgcgctgttgctgtgtacgcactatcgagcgccgaatgcctggctctacctgttcgccttgctcgccggggcgatgccgagcatgccggccatggtacgggcgcgctggaccgagctgtaccggggctcgccgaagctgcacacggcgttttccttcgaatcggtgatggacgaggtgtgctacatcatcgggccggtgctggcggtgagcctcagcgtcggctggttcgccgaggcggggccgctgctggcgacgctgttcctggtcgccggggtgagcctgttcagcctgcaacgcggcaccgaaccgccgctgcatgcccatccgcggcgccgcgccggcagcgcgctggcctatccggcggtacgcgtgctggcgctggtgctggccgccatcggggtgatcttcggcgcggtggaagtggtcagcgtggccttcgccgaggcgcacggcaacaaggctgcggcaagcctggtgttgtcggtctatgccgtcggctcatgtctcgcgggattgctgttcgggctgctgcgctggcgcctggcgctttcccggcaactgctctgcatggttacgctgatggccctgagcctgatgccgctgctaggggtggagagcatccttgcgcttgccctgaccgtgctggtggccggcttcagcgtggcgccgacgatgatcctggccatgggcctggtcgagcgcgcggtggacccggcgcgcctcaccgaaggcctgacctgggccatcaccgggctgggcatcggcatggccttgggctcggcgctggccggttgggtggtggagggctacggcgccgccagcggtttcctcgtcgcggtcggcgccggctggctggcctggctgctggccctggcctgcttccgggtgctggctcaggacgaggccggagactgcgcggtgtccggctgagccgggaaggcgtattcgcgttcgacccgggcgatccgcgcgctgaaaccggcgtaccagtcgcgccggccgcgcgcctgggcgtcgcggtgctccgcgtggcggctccaggcacggatcgccgcctcgctgtcccagtaggagacggtgatgccgaaaccgtcggcgccgcggaccgactccacgccgagatagcccggctggcggctggccagttccagcatgcgctcggccgcttcggcgtagccgtcgtcgacggcgctgcgatgggagctgaagatcactgcgtaataaggtgtcgggccgcgccgggggtggtcgcggcgctgcgtccggcacgcctcgacgaatgccttcggcagtggcggcaggacgccggccagggctgcccgctcgggttggaacagggtggcgacgaagaacggatgctgttccagctccaccgcgcggatcgctccgtcggcgctccaggcgctggcccgcagtgcgccgccggtaagttccgcggcgaagcgcggggcgattgcgtagcggcaatggtagtccgcctcgatccagtcggcggcatacgccagggccaggcgcgagccgcgcagcaggcggacatcctcgcgggcttcgagcagagcgcagggcagggcggcgatcaccgcctggtcgctgtgcggatgctcctcgccatgggtcgccgcctgccagccgagggcgttgcgggcgaactcgaggatcgtgtgctggaagccggcgcaggtaccgaggaacggccggcgccggccccgggcatgggcgatcaggcgcagcaccgcgtcggcgtcgcgataggggctgcccggcacgcaccagaacccgtcatagcgctccagcgccggctcggcgggcaggcggtcgctggccagccagtcgaatgcgatctccaggccgagtgcctcgccggccaggcgcagggccaggggaatcgcccggtgggcggtgatgtgcgggtcgtggtcgccgaccagggcaatgcgcagcggcgccgcgggaggggtggacatccgttttcgctccagtttcgccacgccggttggcgggccctggcgctcactctatagttgcgtttccgcactcgatatcggcgccaatgcaaaagatgaatgcaccgctgcaatatcgcctggaccatgccgatcttgccctggtcctcgccctggttcgcggcggcagcctggcgcgggccgcagagttgctcagggtcgatgtgtcgacggtcttccgggccatccgccggctggagaagaacctcggcaaggcattgttcgacaagagccgcagcggctacctggcgaaccagaccgcccgccgtctggcgcagcaggcggaactggcggagcaggcgctggaggcggcgcgcatcggcctcgaactggagcgcgaggtgctcagcggtaccgtgcgcatgacctgctccgacgccgtcctgcatggcctgctgctgccggcgctggcgcgcttcatgcctggctatccggccctgcaactggagctggcgacctccaacgactttgccaacctcagccggcgcgacgccgacatcgccctgcgcatgacccgcacgccgccggaacacctggtcgggcgcaacctcggtgaggtgcgctacgtgctctgcgccagcgaacgctacctggagggccgcgacgcgacggagcccgccatgctgcactggatcgccccggacgattttcttcccgaccacccgagcgtggtctggcgtcgtcgacactatcccggggtgctgccggcctaccgctgcaacggcgtgctggcggtcgccgagatggcccgcgccggcctcggcctggcggcgatccctgcctacctgctacgcgacggcgacggcctgcgggtactggacgccgacctcgagggctgctccagcgccctgtggctactgacccgtccggactgccgggcgttgcgctcggtggtcgcgttgttcgacgagctggggcggcatgtgcgattgggagatgagtgaaggggtggccgtgcctggtatggcaaccctctcccgcgagcgggagaggggctggaatggcaggcctggcgctcagccgcgatccgccgcggccggtcccggcggcggaatgtcgcccaccgccgccgcgccggtgtccttgcgcaggcgcctgacctcgtcgacgctgacgcttggcgcctggttgccccagctggtgcggatgaagttgaccacgtcggcgatctcctggtcgttcatccgccagccgaacggcggcatggtgaagctcgacggtgcctggtgggtggccggcagggtgccgcccttgagcacgatgtgcaccagggaggtcgggtcgctgccggtcactaccgggttgccggccagggccgggaagacccgcgcatagcccttgccgtcggtgcggtggcaggccccgcagttgtcgacgtagagcgccgcgccggtcttgctgtcatcgccgtggaacagtgcctgggccacgctctcgtcgtagacgtgcggctggtcggcggggtccgccggcggcagcgacttgaggtagcgggcgatggcggtgaggtcggcgtcggtcatgtactgcatgctgtgcaccaccacgtcggacatgccgccgaacaccgcgctgcgctcgctgcggccggtacgcaggaagctgaccaggtcggcttcgctccagctgcccagtccggtccggtggtcgccgcgcaggctcttggcgatccagttctccagcggcgcgctgccggacaggtaggccgcgccatcgctcgccgccagggccttctcctgcatgcccagcccacgcggggtatggcaggcgccacagtggccaaggccttcgaccaggtaggcgccgcgcgccagcaccgggtcctgcccggcggcggcctggaagtccttcacctcgggagcgaaggtccagcgccagaatgccagcggccagcgcatcgacagcggccaagggatgtcgctggccttgttgggctgctccaccggctccacgccatgcatgaagtaggcgtagagggcgcgcatgtccgcttcgctgactcgcgcgtaggacgggtagggcatcgccgggtagagcgtgtcgccggacctggccacgccgtggcgcacggcacggtcgaagtcctcgaagctgtagtcgccgatgccggtcttgcggtccggggtgatgttggtcgagtacaccgcgccgatcggcgtttccatcggcaggcccccggcgaacggcttgccgtccctggcggtgtggcaggccacgcaatcgccggcgcgggccaggtattcaccctgcctgaccagggccgggtccggcgctgcggcggcctgggcgatgccgcaggcgagggcggagagggcgaggaaggctgtcggtttcatcgttgcgctcctcatgcctgcaccagcggaccggggttcttcaggtattgctcgcggatcgccttggccgaccagtaggccagcgccgccaccagcccagtggggttgtagccggtcccctgggggaaggccgaggcgcccatgacgaagacgttgtgcacgtcccagctctgcaggtagcggttgagcacactggtcttcggatcgctgcccatgatcgccccgccgagcaggtgggtggtctggtagacccgtgtattgaagtggtcgccgaagttcttgacgctcaccgagatggccttcgggttcatcgcttcggcgatcttgcgcatgtgctcggtgacgtagcggctcatgcggatctcgttgtccttccagtcgaaggtcatgcgcagcagtggctggccgtaggcgtccttgtaggtcgggtcgaggtcgaggtagttgtcgcggtaggtcatgttgctgccgtgggcgtccatcgacacggtgtgcgtgtaggcgtccttgaccgcctgtttccagccgctaccccagctcggcgtgccgggcggcacggcgaggccgccgatcggcttggagccggcctggttgacccacatcggcgagccgccgacgaagcccagcggtccgtggtcgaagttgtcggcgttgaagtcgtccaccgccacgccgccaccgccggtgccgacgaaggggttggtatgcacgtccttgtcgaagaacgccttgatggtggccatgttctggtaggcgaagttctttcccaccacgccctcgccggtgcgcgggtcgtagggcttgccgatgccggagagcagcagcaggcgcacgttgtggaactggaaggcgctgatgatcaccagcttcgccggctgcacgatctcgcgcccctgggcgtcgacgtaggtcacgccggtggcctgcctgccgtcgctgtcgaggttgaccttgagcacgttgcagttggcgcgcagttcgaacagcggggtctggcgcagcgccggcaggatgttcaggttcggcgaggccttggaatacatgtagcaggcgtagccgctgcagaagccgcagaagttgcacggccccatctgcaccccgtaggggttggtccagggccccgaagcgttggccgccggcaggtcgtaggggtgcaggccgagttcctcggcggccttgcggaacagttgcgcggagtacacctggcgcagcgccggcagcgggaagtcgtccgagcggtcggcggcgaacggattgcccttgccgaccacctggcccttgaccgtatgcgcggtgccggaggtgccgaagaccttctcggcgaaatcgaagtgcggctccagctcttcgtagctgaccccgtagtcctggatggtcatgccttcggggatgaatttcttgccgtagcgttcctcgtaatggctgcgcaggcgcagttcctcgggcatgatccggaaatgcacgccggaccagtgcaggccggcgccaccgaccccgtcgcctggaaggaaggcggagagctggcggtagggcagcgcggtatcgttgatcccgtggcggatgctcacggtgctcttggagagattctggaacagcttgccgcgtgtgttgtaggtcagctcgtcgagggtgttcgggtaggcgccgtcgggataggtatcgcggttctcgccgcgctccagcgccaccacgttgagcccggcctcggtcagctccttggccaggatcgctccggtccagccgaagccgaccaccaccgcgtccaccggtttgagtgtcgtcgccatgttcaacccctctcgccggaaatcgccaccggcgggaagggatacttctcgccgcggtcggcccagtccatgaagtcggcgcgggcgccggggaaaccgaccagcttccagcccaccaggccgcgattgccgccgtgctgcggatcggagaagaagccttcgtgggtgttttgcagcaactggccgaagagcagcttggccggcaggtcctgcaggtcgatctggccggcttccaggcgttgcaggatgtcgtcctgcgccgacggctccagctcggcgaacggcttgccctggttggccttgctccagcgttccagggcggcgatgccgacccggtagatgtcgcgtggcaccagcttcaactgatggccgaactccggcgcggcgtcggtgacgaacggcccctgcatgtaccagagtgcgccgtgcccgtagggggtttccatctgtcggtcgatgaactccggcaccccggcctcgatggcgccggggccgttgtcgtcgctggggatcagtcgcgccaccgcggcgttgacgaaagcccattcggtgttggtgaagaagcgaggctggtagcgttcgcggggtttgtcctgctcggcggcgggcgtctgcatggcatggccgacgccatagccggccagggtcaccgccgggatcacggtcagggtcttgcgcaggaagtcgcggcggccgttgacggccttgtcatcgggcatggtggggtcctctctggatcatcacggtttcgtctttctgataatgattagcaggctaattataagttcatgtgtcacgttgaaaaaacgtttcagcaaggattcaggcaggccaataccggcaagtgaagcagaacggcgcgccgggcgtcggcccggcgcggccttcaggcgcctcgccgtcgcgcccaggccgaaggattgaccaggttcagcggccgctcgccggcgagggcggccagcaggttgtctaccgcgcagcgggccatggcttcgcgggtttcctcggtggccgagccgatgtgcggagtggccaccacgttcggcaggcgcagcagcggcgagtcgggagacagcggctcgcgctcgaacacgtcgaggccggcggcgcggatccgccgctgggccagggcctcgatcagggccgcctcgtcgaccacccggccacgggagatgttgatgaagatcgcctgcgggcgcatccgggcgaactgcgcggcaccgatcaggccttcggtggcggcggtcagcggcagggtcaggcagacgaagtcggattccttgagcagcgcgtcgagggggcggtagctcgctgcgtagcgttcttcgacgtggggcttcgggctatggctgtggtacagcacgcgcatgccgaagccgtggtgcccgcgccgggccagggcctcgccgatgcggcccatgccgacgataccgagggtcttgccatgcacgtcggtaccgaactgggcggcgccgatgctcttcttccattccccggcgcgcacccagccggccagttccactacccgccgggctgtcgccaggatcagcgcgaagccggtgtcggcggtggtctcggtgagcacgtcgggggtattgctgaggaggatgccgcggcggtcgaggtagtcgatgtcatagttgtcgacgcccaccgagacgctggcgatggcttccagtcgcggtgccaggtcgagcagtccggcgtccaggcgcaggctggcgccgagcaggccgtgggcctcgggcagggcgtcgcgcaggcgggccaggccgtcgcggccgggctcctcgaccaggagcacctcgacccgttcgcgcaggcgttccatcaggggcgcggagagacgtttgtagagaaccactttcttcatcggatgctccggagtcggtcaggggtgggccggcgccgcccgccgcgaggcgtgcgcgcgagcggcatcgggctcgcgcttgtcggcgtgcgggttgaggaacacggtgagcagcaccgacagcagcagcgctccgctcatgaacagataggaagccccgggcccgccggtgatgccgttcaggtagccgaccagccaggagccggagaacgagcccagcgcgcccatgctgttgatcagcgccatggcgccgccggcgacgttggccgggaggacttccgggacgatggcgaagaacggtccgtagggcgcgtacatgcaggccccggccagcaccagcagggcgtaggacagccagaagtgctcgctgccgagggcgtaggaaccgtagaaggcgatggacgcgatgagcagcggcggccagacgaaacgcttgcgtttctgcaaccggtccgaggcccaggacaccccgagcatggcgatcaccgccgccaggtagggcagcgccgacagccagccggcttcgatgatgtcgatgttggcgccgtgcttgaggatcgacggcagccagaggacgaagccatagacgccgatgctccaacagaagtactgcagcgagaggacgatgacctttggcgaacggaacgcctcgcggtagttcttcactggcttgatgccctgctgctcggcggccagggcgtcttccaggtcgcgtttttccgagccgctcagccaggcggcctggcgcgggcggtcatccaccaggcgccaccagatgaaggcccagatcaccgccggcaggccttcgatgatgaacatccagcgccagctgaaatgctccaccaggtagccggagaccaccgacatccagaggatggtcaccgggttgccgaggatcaggaaggtgttcgcccgcgagcgctcggcgcgggtgaaccagtggcagaggtagaccagcatcgctggcatcaccgccgcctcgaccacgccgaggaggaagcggatgccgatcagcagatagacgttggcgaccatcccggtcagggtggccagtccgccccagaggatcaggctgacgaagatcagcttcttgacgctgcgcttttccgcgtagatcgctcccggcacctggaagaagaagtaaccgaggaagaacagcgcgcccagcagcgaggacagcccgggagtgatccgcaggtcgtcggccatcccggaggcggcggcgaagccgtagttggcgcggtccaggtaggccaggctgtaggtgacgaaaacgatcggcatgatgtaccaccagcggctgctggcgaggcgaggcatggtcatggtcatggtcgggtatctcctgagcttgtcttgttcttgtcgcaacaggtgccgcgtgggcggcgggttcaggcgctcctgcggcgctcgcggtcgagcagttggctgcgtttcggcagcccctccatgtcgccgcggacctgtaccgcgcggctgccgatccagttgccgcgcgccaccgcgtcgggcagcggcaggccttccagcagcgcgctgaccaccccgaccgcgaagccgtcgccggcgcccacggtgtccaccacggtcgccaccggcacgccggggaccagcccttcgccgtgggcatcgcgatagtaggcgccgctcgggccgagcttgatcgccaccgcgtcgacgcccatgtccaggtagaacgcggcgatatccgcgggttcctgccagccgctgagcaggcggccttcctccaggcccggcaggacccagtgggcatgcgcggcgagggcgttgatctcggcgatcatgcggcgctcgctgggccacagcgagggccgcaggttgggatcgaaggacaggctggcgcccctgccgcgcatgcgccgcatcagttcgtgggacagctcgcaggcactcgccgagagtgccggcggaatgccggtggcgtgcaggtggcgggcgccgagcatttcttcgcggatatgggcgaggcccagccggctggccgccgagccgcggcggaagtactcgacccgcgggtcggcaccatcgacctcgcgggacttcatctggaacccggtgggcgcttgcgcgtcgacctcgacgaagcggcagtcgaggccctcgcgggtcaggctgtcgagtacgaagcggccgagcgagtcgtcgccgacccggctcagccaggccaccgtgaagccgaggcgggcgaggccgatggcgacgttgctgtcggcgccggcgatgcgcttgccgaactgctcgacccggtccagttcgccgggctgttcggcgacgaacatggccatggtctcgccgaagcagaggatctcgaagtcagccatgctggcgttcctcctggggctggccgaggcgggcgagggcggcgatgtgccggcggctgagactgagcaggtcgtcgccctgcagcgggtattcgatggcccgcgccacgccttccgggaaatgctgcagcaggcgctgccagtactgcaggtcggcggccgacggcggcaccgcgaccagcttgccgtcgcggttgcggatcaccgccttgcagtgcacgtagccgacatagcggccaaggcgcagggcggcttcgtcggccgcctgctcctgccagcgccagttgccgatgtcgaaggtcatcgccaggtccagctgctggcgttcggcgaggcggaagaagcgttccagcacctcgatccggccgccctggggcgtctggtcgttctccaccagcagttgcaagccgtggcgcgccaggcgccggccgagggcggcgagatcgggctgttccggcagaaggccgagcgagaccttgagccatccggctccgcaagcttcggcgcggcgcagggtcggctccagctcggggttcaactggccgtcttcgcgccacagctcgaggggtgaggagaacacgcactccagcccctgcaactggatggcggcggtcagcgcctcggtatccggcgggccggcgaagagttcctcgcgcagttccacgcgctgcgcgccggccatcgccagcaagggcaggaagctggcctggccgcgactgcgaacgaggtccgcgccatagctggaaagactgatggagacggggtgaagggacattggcgatcctctgaaaccggtttcatttcaagccgtgcgaaagccgccggcaacgcgccggcggcgggccgctagccgcgtggatgggtcgagccgcgaacgatcagttgcgccgggaaggtcacccggcgcgccggctcgcggtcgccttcgagtcgcgccaggaggcgctcgaaggcggtgcggccgatttcgtcggtgggttgggcgagggcggtgatgccgctgcccaccagtgggtaccagtcgagttcgtccagggccagcaggccgacctcatcgaacagccggcagccgaggtcgcgcagttggcgggtggcgcagagggtggcgacgccgttgcaggtgaacagcgccttcggcccggggccgctggccgaaaggaaggcgcgcaggccgtcgcggaagaagtcgtcggtttgcaggacctggcccttgagcgccggtcgccggccgatggaggcattgaaggcctggacccgctcgatccgcgagctggtgccgtcgagcggttcggtgaccagcaggatgtcgcggaagccgcggtgctgcaggtggtcgagggcctgttcgacggcgtcggcgttgtccaggccgaccaggtcggtatccagctcggccaactggcggtccaccagcaccatcggcagttcgcggtgcagggcgcgcaattcgccgggatggtggccgagggtgttcacgatcagtccttcgacgttgtaggactgcagggcggccaggtgatgacgctcctgctcgtcgtcgcggtcggtattgcacaccaccaggctgtagccgtgttcgcggcaggcggtttccacgccatgcatgacggccacggagtaggggttgaggatgtccgccaccagcattccgatcagccgtgtgcgcccgcgcttgaggcctcgggccatctggttggggcggtagtcgagctggtcgatggcgcgctcgatgcgccgggcggtggcatcggcgagcaactggcggtcgccgccgatatagcgcgacacgctggccttggagacgccggcggcctcggccacctggttgatggtgacgcggccacggctgggcagtactgaaccattcacggacctggtacctcttggtgctgttcttattggtgtgtccggctggtcttcgccagcggatgccaggagttgaaaccggtttcagaaaataccagaaggccgatgcccgtcaacgggaaaaaaacgcctaccggggccgagccaggcatgaggccaggacgttgttcatgaaaaccgaataatcgtttcgaatgatggtttgcaattattaatgtcgaatggaatgaatgtgccatatctccataaataaaaaggaagtttgtccaatacttgagaaactactttaagaaggttttgtcggtagaaagcgatcaatcaggcgagcttcgctgacatgaaaagcacccggccgaccgtctgaagcagttctcatttatcggaaaacgaaggtggcgcgctgaaacttatgcgcgcctggcggtctttatcgacgacctgaccgcccggtcgcgtcatcacgctcaccgatcgttgcgggtcctgtcgaatgccgccgttccgtcgcagcaggatttttcgacaagacccgtccggacccacttcccggctaaggaatgacaggatgagcgccgccctggagcgattgaatcatctgaacctgaatcacttgtatgccttcgtcgccgtcgccgaacacaacagcttcaccgccgcggcggaggccctgggcttgtcgaaatcgctactcagcgagcagttgcgacgcctggaggccgacctcgggatccagttgctgacccgtaccacccgtcgcatgacccttaccgatcgcggcgaactgctgttcggcgtggcccagcgcatgctcggcgagctggacggcgcgctctccgatgtgcgcgacctgcagggcgagcccagtggccggttgcgcatcaccgcgccgcaggacttcgtcaagtggcacatcagcagcgtttccgcggcgttcatccggcagtttcccaaggtccaggtggaaatgctggccgatgaccagttcagcgatctggtcggccagcgcatcgatctcgcagtacgtatcggctggccgcgcgactccggcctgcatgccagcaagctgtgcgacttccagcaggttgccgtggcgacgccgggatacctcgccggcctgccgccggtgctccagccgcacgacctggcgcgttgcgaatggatcggccatacccgcctgagcacgccctggacctggaccttcgaacgccagcgcgagcgtgccacggtacagacccgagggcgcctgctggcgaacaacaccctggcggtgtaccgcctggtgctcgacggtgccggcgtcagcgtgctgccgagcttcctggtagcccgcgagatcgcccgcggacggctggtccggctgctgcccggttggcgcctgccgcagggcggcatctatgccctgtacccctcggcgcgctacatgccggtgcgggtcagggcgttcatcgagtcgctgcgcgagcatctcggtcgcgagccgttccgcctggcgcagagcgaatgaggccgggcatccgtgctggggggctgtagggcgaataacgccacaggcgttatccgccgccgacgtcacggataggcggcggataaccgcgagcggttattcgccctacggatcgggcttcggcagcatctcggtcgcaagccattccaactggcgtagggcgaataacgccacaggcgttatccgccgccgacgtcatggataggcggcggataaccgcgagcggttattcgccctacggccccaggctgcccaggtagccggcgagcgcctggatgtcgctatcctccaggccgccggcgaccgcgcgcatggtcgcgctgttgccgcgcttgccgtcgcggaagccgtgcaactgggttgccaggtattccgcccattgcccggccaggcgcggcgccttcagcgccgccaggccctgggcggcgggcccgtggcaggtgacgcagggcggtacgccgcgctgcgccaggccgttctcgaagagctggcggccgcgttcgcgttgcctcggatcggccagggtctgttcgccggcactcatgcgctgggcggcgaaccaggcggagacgttgaccacgtccgccgcgctcagctcctcgccgcgaccgttggtggccgggttgcgccggcgctgggtcttgaggtcgtagatctgcttgtacaggtattcccggtcgagcccggcgagcttcgggtagctgcggttcggccgcggcccgccgttgccgtcgtcgtcgtggcagcgcgagcacattttctgcgccatcgccttgccgcgcgccaggtcggcgggcgcgtccgggcccggcacggcggcggccagcggcagggaaagcagggccgagaggcagccggccagccagcatttgcgctcagtcatgctgccagggcccccgcagccagccgtggatgtcgtagtcggccatgcagcgctggaccatcgcctcgcagtaggccaggtgcccgctacggctggcccaggccagcgagtcgaggcggatctgctcggcattgccggaataatggctctcatagaccgcgtggcgcgcgccgaactcgctgccggtggcgtcccagatcagcttgaacagcttcaggcgctgctccggctccagctcggcaccgcggtagtagctgtccaccagccgccgcgcctcgccgtcgcgcaggtcggcggcgcccgagacggtgaccagcggggcgccgccgagggcgctttccagcagctcgcggacccgcttccagatctgcggcacctggatgcgcagggcattggcgtactccaggcgcggcaccgccgaaccggcggcgttgcgctccgggtcgcgggccatggcggtggtcagcgcctgcagcaggtgctgcagggcgatcagctcgccgagggccgcctgtatcccgcggaagccctgggtgccattggcgcgcacgccgagggaaagcaggccgatcatcagttccagcttcaccccgaggcggatgccggactggaagttgtacaggttggcgaagcccgactcggcatagaagccggtggcgcggcgcaggtcgcggtagaccaggacgtcctcccagggaatcagcgccttgtcgaacagcagcacgctgtcgttctcgtcgaaacgactggacagcgggtagtcgaagggactgctcgcgcgctcctcgtaggatggccggcacatcaggcgcaggccggggttgtccatgcgggcgaagaacacaacggcgaagtcctcggccttgccggcctccatctgcgccgaggcgaccggggcgacgaaggtggcgttggtgatggcgctgccggtggcgagcatcttcgccccgctgacgacgataccctggtcggtctcgcgttcgacgtggacgaacacgtcgcgcatctcgtggatcgccttgctgcggtccagcggcggattgatgatcgcgtggttgaggaacagcccgcggtcggcgaaggcgcggtgccaggcgcaggcgttctgccggtagtcgccgtagaagccggcgccggcctccagcccggacatgaacgccgccttgtagtccggggtacgccccatgaagccgtaggtcatgcgcgaccagcagccgatcgcctcgcgcgcgccgagcaggtcctcggcgttctgcgcgggggtgaagaagcggtggctgcggcggccctgggcatcgacccgggtgaggacgtcgcgctgctcgccgtggaggccgtcgtagagcccggcgatgctgcggcaggcgttgcggaacgccctgtgccgggtgacgtcggcgacccgttcgccgttgaggtagacctggcgaccgtcgcgcaggctgtcgagatagtcggcgccggtcatcagcgcgttggggacggaatggctcatgctggttccttgtcgggacgccggccgtggcgcgtacggccggcggggcggtcagtcgcgctgcaggtgcgggttgcgcagcgccggctcggcgtggatatgcacccgccgcaggtggcgcggcgcgcggtgggcgaaggcctcgcgaccgtgcaacagggtcaggttgtcggcgatcaccaggtcgtcgctgcgccagcggtgggcgtagtgcgcctgtgggtggtacaggcagcggcgcaggctgtcgagcagttcgccgcgctgttccggggcgatgccgtcgtagtggaactcggaggggttgatgaagctggcgtcgccctcgaccggcggttcgcagaaacgcaggatggggaattcgcggcgcgggtggcgctcgactatcggcgccgccgagcggctgctgtagtgcgccgcgctgcgctggtaccggccgctggcgcggcgccagacttccagctcgctactgtcggccagttgcagcgccgccggggtcgagctgaaggtggtgcggccgccgtcgctgtcgccgggcgcgtcgacacagtggaacacctggaattccgggaccgtctccaggtacatgccgtcccagtgcagcggcacgtagttgttggcgaagatgtggtcctcggcgccttcctgttccaccagctcgagcaccgcgccgaacggccacagcatgacttcgccgaagtcgtggcagtagcgggtcaggctctcggcgtcggcgaaggcggcgaagccgcgcaggagcagcaggtggtggctgcgagccaggcccttgagccactgcgccggcagctcgccgacgtgcatgccggggcggccgggctccagcagcaggccgaagcgcggctggttgccctgttcgtcgcgcagcggcgagagacgtaccggttgatcgctgagataggcgttcatcgtctggctcctcgggctcaggccacggcggcgcgccgggcggccctggccggcaggcggtagtgactgggctggccgttgatctgcaccagctcgccgccgagttccagcacctcgctgcgcttcatcagcacgaagcggtcctcggtgttcaccgccacgccgtgccagggcgtcagccagtcgtcgcgggtcggcatcatgtggatgccgaacttcagactgtccgccggctgcggatggatggacaggcggatcgcgcgggggaactggtcggccagcagcgcgccccaggcccagctgcgctggatcaccccgtaggcgcgctccttggcgtcgcgttgcagggcagtcttcgagccctggtagtcgggggtcaggccgtcctcgtagaggaaacgggtgatggcgcggtacagcagcaggccttcttcgctggccagcagggtctcgcggatgctttccagcggctcggcgtagccgtcgatcagcaactggcggagctgctcgtggttgtcgcgctgggcctcgaaggcgcgtacgtcctccaggttgaacacgccgatatgggtggcgccgatctcctcgatcatcaggcgcaaggcatcctggtaggcgctgatgtgcgcatcgccgatcctcaccaggtcgccgaacacccggccgtcggagcagacggtgatcttcgcgcccggtgcatagaacagctggatgcgctggcacaggtggttgaggaacgacagcgacaggcgctcggccatgtccggacggctgtcgaggaccttgccggggttcggcgacttggccggaaacgccggtaggacgaattcgatgggctcgccggcttcgatgaaggcggcgatgcgcggcaactggacctgttcgatgcggcggatctcgtccgcttcgctggcgctctggcgatgctcggggtaacggcggcgatagagcaacagttctttcaatacgcgtgcgggaagggtgtcttcggcgatggcgtacatgcaggtgtttcctccttgtgggcggatgccggcggggccggcagcggaaggcgacatcctgtggactcgccgccgggggataaaccggggaaggccggaaacactgttcgctgaagcttgacgatgggcgccgggcacgggcgggccgccggcgttgtcgcgtatcgcggggagggctgaaggaagcggccgccggcgggcggccgcagggcggtcagtcggcgttctcgccgcacaggtcgagggcgaaccagcgttgcgcttcgtcgcgtccgaggccggcgccgagcaggccgaagagcttgcccagggccgcctcgcgggtcattccgccagccgagagcaggccggcgtcgcgcaggcggctgccggcggcgtagacgccgaactcgacctggccgtaggcgcactggctgaccgcggcgagcagcacgccgcgggcgtgggcttcgcgcagcagcgccagcagctcctcgtcgtcggacgggccggtgccgctgccatagcattccagcagcagcgcttccacgccgctgtcgagcagcccgcgcaggtgcgcggcgcgcagccctggatagagcggcagcacggcgaggttcacttcccggcgcggctggcggtagccgagcgccgcaggcaccggcgcatgctcggcgtggcgcggtcgcggcagttcggcgaaggcgtcgaacgcgtcgctgcgcagcttgctgactcgcgcgccgtgcagcagggcatcgttgaaatagacctgtacgccgcgcgcgtggccctcctggaggacgcgcagggcgccgaccaggttgtcccaggcatcgctgcccggcgcgccggccggcagcatggagccggtcagcagcaccgggaccggcaggtcgaggagcaggaaggacagcgccgcggcgctgtaggccagggtgtcggtgccgtgcaggagcagcacgccgtcgtggccggcgtcgagcgcggcgacgatggcgtcgcgcatcgccagccagttgccctgggtcatgttggcgctgtccagcggcggttgcagttcggcgaagcgccagcgcaggtccggggcgtcgccgaggctttgcaggtggtcgcgcatgcgcgcttcgaagccaccggccggagccagtccctgaggggtctgcagcatgccgatggtgccgccggtgtagagcacgaagaggttcttgactgggagcatccgtaatccttgtgtcgggccttttcgcgccggacgtgcgaagaggggacaccattgtggcgcaggcgccgctccggggggagggcgcctgcgcgagactcagcgattgccgctcggcagcggctcggcgtccgcctgcgccgggggctcggcgcgctggccggcgggccaggcttcgcggtccaggtcgaggtcggcgaactgcgccgagtcgaacaccggttgcttgatcccggcgcggcgctgcacgtcatagtcgcgcatcacccgcaggccgaccttgaacagcagggccagggccatcaggttgacgaaggccaggcaggtcatggtgatgtcggcgaaggcgaacacggtggacaggtcctgcaccgagccccagaccaccagggccagcaccagcgcgcggtagccgatcagcaccaggcggttgcggctgaggaactgcaggctgttctcgcccaggtagaagttgtagaggatgcaggtgaagacgaacagcgacagggccacgctgacgaacacccggccccagtcgccgaccaccgcggccagggagttctgggtgaggacgatgccgtcgccttcgaagcccggggtgtagaagcccgagagcaggatcagcagggcggtgcaggtgcagatcacgaaggtgtcgaggaacacgctgaaggcctggaccacgccctgtgccgccggatggcgcacggcggcgaccgcggcgacgttcggcgcgctgcccaggccggcctcgttggcgaagacgccacgcttgacgcccatcacgatggcgctgccgagcaggccgccgaacgccgggtctaggccgaaggcgctcttgacgatggtttccagcattgccgggacgtgctcgatctggctggcgatgacgtacagggtgacgccgatgtaggccagggtcttgatcggcaccagcaggtcggagaccgcggcgatgcgcttgatgccgccgatgaagaccacgccgagcagcaccgccagggcgatcccggtgtgctgcggggcgaagccgaaggcgttctgcagcgaatgggtgacggtgtaggactgcaggccgttgaaggcgaagccgtaggtcaccagcaggagtaccgcgaagaccaccgccatcgagcgcagcttcaggccgtgctggatgtagtaggacgggccgccgcgatacaggccgtcgccgtcgctgcgcttgtagacctgggccagggtgcattcgaagaagctgctggacatgccgaccagcgcggtgacccacatccagaacaccgcccccggaccgccgagggtcacggcgatgccgaccccggcgatgttgccggcgccgacccggccggcgaggctcagcatcagggcctggaaggaactgagctggccggcctggccgcgcagcgattccctgaatacgccgaacatgtggccgaagtggcggaactggacgaaacgcgaacggatcgtgaagtaggcacccaggccgacgatcaggacgatgaggacttttccggaaaggaaatcgttgagcatttcaagcatggaggtctacctcggttcttattctggtaccggcgtgcgctgcggcagcgccttggtgcgcggcgcatggttggccatgacgcacctggttacaatttcgcgggttgctcctgcttgatgcgacctgatgctagaatcgcgtccatagcatcagttttggagccatcgatgtccgagcacctgggcgccaatctcaagctgctttgcagccattaccgctcgatttccgaggtttgccggcaattggcgatcaatcgcgcacagttcaacaagtacctcagcggccagagccagccgacgccgtacaaccgcaagcggatcggcgacttcttcggcgtcgaggactacgagctgggcttgccgcccgagcagttcgcccgcctgatcggcgcccgcaccagcgcccagccgcgccagcccagcaacgacccgctgttgcggctgctgcaaccgctgcgcgccgaggccggcgacctgggccgctactgcggctactacttcgaatatgccaactgcatgtcggtgccaggcagcatcctgctctccctggtacatctctacgaggaggacggcgtgttcctcttcgagcgccaggaacgccaggagcgcaccagcagtaccgacgtgcaggcggaggagtgggcgcgttgccgctatctcggcgcggccttccagttgcaggaccgggtgttcctgatcgactacgagtcgctgactctcaacgagatgagccagaccatcctcattcccagtttcaagagccgtatcacccgcctgaacggcctgaagatgggcgtttccagcggtgaccggcggaccccggcatgcagccgggtggtctgggagtacctcggtgcggaaatcaaccggatcaacgcctaccgccaggtgcgcctgtaccgcccggacgatccgcggatcgacgaggatattcgccagcgcctggcggcggggagcttgcggcatgggttgctggagacggagtgaggggcgggggatcgcgcagggcggtgagacctgctgacgacccggttcgcggccacgaaaaaagcccccttgcccgacgggcaagggggtaatgtgcgccggtggttggccggctaccgaggttcgcgggaatcagatgtgcagggcgtgtcccagcgcgcgcagggcggcttcctggaccgcttcgccgagggtcggatgggcgtggatggtgccggcgatgtcttccaggcgggcgcccatctccagcgactgggcgaaggccgtggacagttccgagaccgccttgcccaccgcctgccagccgacgaccaggtggttgtcgcgacgcgccaccacgcggacgaagccttcgttggcctccagggtcatggcgcggccgttggcggcgaacgggaaactcgccaccaggcagtccaggccggcatccttcgcctgctccggggacaacccggcgaccaccacttccggatcggtgaagcacaccgcggggatcgccaccggggcgaactggcgacgcttgccggcgatcagctcggcgaccatctcgccctgggccatggcccggtgcgcgagcatcggctcgccggcgagatcgcctatggcccagacattgcgcatcgaggtacggcactggtcgtcgaccttcaccgcccggccgttcatgtccaggcccaggctttccaggttccagccttcgctgcgcggcttgcggccgaccgccaccagtacctggtcggcggcgatctcgcgctcctcgccggcgccgtcgcggacccgcacgccgttctcgctcgggcccagcaggctgtgcccgaggtacagctcgacgcccagcttgcgcaaggcctgggccaccggcttggtcagttcttcgtcgtagcccggcaggatgcgtggttgcgcttccaccaccgccacctcgacgccgagcttgcggtaggcggtacccagctccaggccgatgtagccgccgccgaccaccaccaggcgcttgggcaggctgccgggcgccagcgcctcggtggaggagatcaccttgccgcccagcggcaggatcggtagctcgacgctctgcgagccggcggccagcagcaggtgctcgcactcgatgcgctggctgccgccgccggcgagttcgaccgccacgcttttgccgtcgaggatcctcgcccagccctggacgacatcgaccccgtgtttcttcagcagcgcggcgacgccgctggtgaggcggtcgacgatggcgtccttccattccacggtgcgggcgatgtcgatgctcggcgcctgtacctggatgcccagcgccgaccggccggcatagtggcgggccttgaggtattcctcggcggcgtggatcagcgccttcgacgggatgcagccgacgttcaggcaggtgccgccgagggcggcgccctccaccagtacggtgggaatgcccagttgcccggcacggatcgccgcgacgtagccgccgggaccgccgccgacgatcagcagggaagtcttcaggatctggctcatcgcttactccaggaacagggtggcaggatgttcgagcaggccgcgcacggcctggatgaaggccgccgcgtccatcccgtcgaccacccggtggtcgaaggaggaggagaggttcatcatcttgcgcacgacgatgttgccgccgaccaccatcggtcgctcgacgatgcggttgacgccgacgatggccacctccggatggttgatcaccggtgtgctgacgatcccgccgagcgcgccgaggctgctcagggtgatggtcgagccggacagctcctggcgttgcgccttgccgctgcgtgcggcttcggccaggcgcgccacttcgctggcgttgccccagaggtcgcgcgattcggcgtggcgcagcaccggcaccatcaggccgttgtcgctctgggtggcgatgccgacgtgcaccgcgccgtagcgggtgaccacctcggcctcgtcgtcgtagcgcgcgttcaactgcgggaagtcgcgcagcgccacgaccatggcgcggaccaggaacggcagcagggtcagcttgccgcgctggccaccccatttctggttgagatgggcgcgcagggcttccagatcggtgacgtcgatttcctcgacatagctgaaatgcgggatgcgtcgcttggcgtcctgcatcttctgggcgatcttgcgacgcaggccgatcaccggcaccgcctgttcgtcgtgtcgctcggcatacccctgcgcggcgccgccgctgcgcgcgacgctgccatcctgggtcaggtaggcatcgaggtcctcgtggaggacgcgtccggcgggaccgctgccctgcacgaactgcaactcgatgcccaggtcgcgggcgcgctggcgcaccgcgggggaggccagcgggcgttcgccgggctggcgccgctgccgtggcgcctcgctgtcgcgcaaggcgcgcggcgcttcggcggcggctttcggcgccgcgaccggggcttccttcggtttctccggggtggcggcgacgggcgcggccggcgtcgccgcggccggactctcggcgaggttgccggcgccttccacctccaggcggatcagttcgccgcccaccgccatcacctggcccggctggccgccgagggcgaggatgcgtccggccaccggcgagggaatctccaccgtggccttgtcggtcatcacctcggcgaggacctggtcttcattgaccgagtcgccgacctggacatgccactccaccagttcgacctcggcgatgccttccccgatgtccggcatcttgatcacatgggtacccattcagacctccatcacacgcttgaatgccgcgccgacgcgcgcggggccggggaaatacgcccactcctgggcatgcgggtagggggtgtcccaaccggtgacgcgctcgatcggcgcctccaggtggtggaagcagtgctcctgcaccagcgacatcagctcggcgccgaacccgcaggtgcgggtcgcctcgtgggcgatgacgcagcggccggtcttcttcaccgaggcgacgatggtttccaggtccagcggccagaggctgcgcaggtcgatgatctcggcgtccaggccggtctcgtcggccgcggcctgggccacgtagaccatggtgccgtaggtcagcacggtcagcgccgcgccggggcggacgatcgccgccttgtccagcggcaccttgtagtagccgtccggcacctggctggccggatgcttggaccagggcgtcaccgggcggtcgtggtggccatcgaacgggccgttgtagaggcgcttgggctcgaggaagatcaccgggtcgtcgttctcgatgcaggcgatcagcaggcccttggcgtcgtaggggttggacggcatcaccgtgcgcaggccgcagacctgggtgaacatcgcctccgggctctggctgtgcgtctgcccgccgtagatgccgccgccacagggcatgcgtacggtcatcggcacgatgaagtcgccggccgagcgatagcgcaggcgcgccgcctcggagatcaactggtcggaggccgggtagacgtagtcggcgaactggatctccaccaccgggcgcaggccgtaggcacccatgccgaccgcggcgccgatgatgccgctctcggagatcggcgcatcgaacacccgcgaggtgccgtatttcttctgcaggccttcggtgcagcggaacacgccgccgaagtagccgacgtcctggccgaataccaccacgtcgtcgtcgcgctcgagcatgatgtccatcgccgagcgcagcgcctggatcatggtcatgctggtgaccgtctgggcgttctcgtgttgcgggttcatggcattcataccccgagctcctggcgttgccggcgcaggtgctccggcagttctgcatagacgtcctcgaacatgctggcggcgctcggcacccggccgtcgatcagggtgccatggctctccgcctgtttctgcgcggccagtacttcggcttcgagggccttgtgggtggcttcgtgctgttcctccgaccagatgccgaggccgatcatgtgccgcttcaggcgggcgatcgggtcgcccagcgggaagttggtccagtcgtcggcggggcggtacttggacgggtcgtccgaagtcgagtgcgggccggcgcggtaggtgacccattcgatcaggctcggcccgaggttgcgccgggcgcgctcggcggcccactcggaggcggcgtagaccgccaggaagtcattgccgtcgacccgcagcgaggcgatcccgcagcccacgccacggttggcgaaggtggtgccttcgccgccggcgatggcctggaaggtggagatcgcccattggttgttgaccacgttgaggattaccggcgcgcggtagacatgggcgaaggtgagggcggtgtggaagtccgactcggcggtggcgccgtcgccgatccaggccgaggcgatgcgcgtgtcgcccttgatcgccgaggccatgccccagccgaccgcctggatgaactgggtggcgaggttgccggagatggagaagaaaccggcctccttgctcgagtacatgatcggtagctggcggcccttgagcgggtcggcctcgttggagagaagctggcagatcatgtccaccagcgggtattcgcgggtgatcaggatgccttgctggcgataggtcgggaagcacatgtcgccgtcgcgcagggccagggtgtgggcggtggcgatggcttcctcgccgaggcattgcatatagaaggaaagctttttctgccgttgcgcggtgagcatgcgcgcgtcgaacaggcgggtcttgagcatcgcccgcatgccgcgcagcagttgttcgttgctgagctgcggattccagggaccgacggcgtggccgtcgtcgtcgagcacgcgtaccaggctgtaggccaggtcgctggtctcggcgggctcgacatccaccggcggcttgcgtacctcgccggcggtggacaggtgcagataggaaaagtcggtcttgcagccaggacgcccggtgggctccgggacatgcagacgcaacggctcgtaatcactcatgacaggcctccggcccggtccgggccaaacggttggagagatcagaaacgggcgaacggcgctcgaagcggcggactgggcggatggcgggttcccgtcctgtgggtgggggcgggttgcaggcatgccggggtacggcaggcgcggtcgtactgggtgacgtcactcatggtgaggccctcgggttttgtttttgtaatttcagtataggcttcgggtgctagttttttgctccaaattgactaaggtattccggcagtattgggttgtttgaactacaagaatcgctaacaagagaaacaacgcaccatggctgaactcgaccgcatcgacctgaaaatcctccgtgccctggccgacgacggccgcctgagctggcgcgatctcgcccagaaggtcggcctgtcgctgacgccgacgctgcgccgggtacgccgcctggaagaggaacactacatccagggctacttcgcccggctcgacgaggagcgcctgtccggggcgatgagcgtgttcgtctcggtgtccctggaaaagcagaccggcgactacctcgctcgcttcgaggaacgcatcgtcgatgcgccgcaggtcatgagctgtttccagatgaccggcgatgcggactacatgctgcgggttgtggtcaaggatctcgccgcctaccaggcgttcctcaccaataccctgacctgcattcccggcgtggctggcatcaagtcggccttcgcgctgaagtcggtgatgctgcgctcggccccgccgctctaagcatagaccctgtctatctgcgtaacgttacgctattctgattgcgtaacgttacgcagatggaggcgttcatgaaagccagcaaacccgggcccaagccgagcggcaaggccaagtcggccgcccagcggatgcgcgaataccgcgcgcgcaaggccgaagaggccctcggcgccgagcattccgacaaggagcgcgagcggcagatccgccgtgaggcgcgcgccgaactcgaacgcgtgaagctggagcagcagcgccgcgaacacaccctgcgcaaggaactggaagcctgccagaccgagattggccgcctgctcggcctgctgcgccggcacggcatcgatccgcacccgggcaactgatcagccgggcgtgtcgaggaaggccagcagggtcgcttcctcggcactcagccagcggcgcttgcgggcgcgcctgagctggcccagttgcccggcctggtaggcctcgatgatcgccgggtggatgtagcattgccggcagatcgccacgctgttgcccaattcggcggcgacctccgccaccaccgcgccaagcccgtcggcttcggcacgtcgcagacgctccagcgccagcgcgctgccggcccaggtacggtagtccttggcgctgaaatcctcgccggtatgccggcgcaggtactcgttgatgtcgtgggagccgatgcggtgcggctggccgtcctcgtccaggtactgcaacaggtcctggccgggcaattccaggcagcgccgcagcacccgcgccaggcgcggatgctccaggctgacgtcgtgctcgatgccgctcttgcccttgaagcggaaccggatgcgactgccgttcacgtcgacgtgccgggtacgcagggtggtcaggccgtaggagcggttgtcgcgggcgtagcggtggttgccgacgcggatcagggtggcgtcgagcagcgcaaccgccagggccaccaccttgtcgcgaccgaggccgggcaggcgcaactgggcgtcgatgtgccggcgcagccgcggcagcgcctggccgaagcgcagcaggcgctcgtacttgtcggcatcgcgtacctcgcgccagcgcgggtggtagcggtactgcttgcgcccacgggcgtcgcggccggtggcctggagatggccgttggggtcgggacagatccagacctcgcgataggccggcggaatggccagcttgtccagccggcggatctcctcggcgtcgccgatgcgctggccgtcggcatcgaaatagacgaagcgcttgccctgccggcgtcgacggatgcccggctggcggtcgtcgacgtagcagaggccggcgggcagggcggggatatccggtggcgctgcgctcatgcttgggttccgaaggaaagcttgcctgtttaggccgctgcgcccgctggaacgttcaaccgcgctgcgcttgctcctgctcgtagccgagggcgccggcgatatggcggccggcgatgtagccgaaggtcagcgccggccccaggttgatgccgccggagggatagtggccggcgaacaggctcgccatgtccgcgcccgccgcgtacaggccggggatcggctgcccgccgccgtccagcacgcgggcctgggcgtcggtcttcagcccggcgaaggtgccgaagcagccgggctcgacctgcaccgcgtagtacggtccgcgttcgatgggggcgacgcagggattcggccccggatacgccgggtcgccctgcttgcggttgaatgccgtgccgccgcggccgaactctgggtcgcggccctcgcgggcgtggcggttgtattcggcgacggtggcggccaggccggacgggtcgatgccgcagctccttgccaactgatccaggctggtcccgcgcttgagatagccgctgcgcaggtgcgcggcgatcggcagcggcgccggacgcacgtagccgaggccgtagcgacgcaggaagcgccggtcgcagaccagccaggagcgtgccggctgcccgggcggggtggcctcgagcagggcggcgacatagtcgtggtaaccgtgcgcctcattgacgaagcgcctgccgttggccagcacgccgatcagcccgggcttgccgcgctcgatgatgtgcgggaagtgcccggtctcgccatcgccgtggggaactcgcgagaccggcgcccaggcgatcggcgagcgcaggtcgtcggccacccggccgccggcgctttcccccaggcgcaagccgtcgccgttgcagcccggcggcggcagcggcagcagggtgtccagggtgggggccagctcggcgcggcgctgcggatcatgtggaaagccgccgcaggccaggaccacggcgcctgcctcgatgcgcaggagtccctcggcgctctcgaccagcgcgccgaccaccttgccgtcacgcagcagcagttcgcgggctggcgccgattcgatcaggcgcacacccagggcttcggcggacttggccaggcgcgctaccagggccacgccattgaccaggtgcatggcgcgaccgtagcgcagcaggtgccagaggtggctggaaaagcgccgggcgacatgcaggaaggccggcagcgagcgggtcaggtcgaggaaggcggcgaggtcggcgccggccatgatcggcatgcccatgaacgaggtctcccgcagggtcttgcgcaggcgcggcagcagcgggcccagttgccgtgcgtcatagggcgcggcgaccaactggtggccgccctcggcggcgcccggcgtgtcgccatgcatgtccgggatgccgttgccgtcgacgaaccgcaggtgggtgtggcgctcgaagaaggccaccatgtgcgggcaggcttcgaggaaggcgtcgatccgcgcggcgtcgtaacgctcgcccagttcgtggcgcaggtaggtacgcggttgctcgatgtcctcctcgataccggcgcgacgcgccagcgggttgcgcggcaaccaggcccagccgccggaccaggcgctggcgccgccgaacaccgggtccttctccaccaggactacccggcgcccgtgccaggccgcggtcaccgccgccgccagcccggcggcgccggagccgacgaccagcacgtcacaggttagcggggtggtctcgacggccgcagaggtcatggcttctccctttttcaagatttcggaacgatgttccatattctagggaggcaatgcccgcgtaccaacccgctcagcgaaaggagcgggcgatcatcggccaggtcgaagcgaggtcggccgcccgttagggaaaagggagacgggaggggaaaggcccggcgcaggcgcaccgggccgagggcgtcagcgcgcttcgccgccgccctggaccgcggcggccttcttgcgcaccgggaaggggaagtagagggcgcgcagcagcgcgacgcgcttgatcacttcgccgatcagcagcgagacgatcaccgagatcaccagggcgacgctggcagcggccggttccgacagacccaggtggaccagcaggttgaaggtcttgtgctggatctcgccgtggaagatcagcaggatcagggtcgactggccgatgtaggtcatcgccttgcccagccagtcgatcttcatcatcagcccggacagcgcccagcacaggtagacgccgctcaccgcctggacggtggcccagaaccagtggtcgtagcggcgctgcgccatgtccaccaccgtcgggtagtagaggaagctggcggtggtcacggcaagggcgatgcacagggtcagcaacgaactctggtggcgacgcaggacgtcgcgcaggacatagccgaacatgaagtgggcgctgctgatcagggtgatgtccaggctgaacggcaggcccggcagcaggtactgttcgccgccgaactccaccgggatctgccagaacgtcttgaggaacaggatgcccaggcccagttgcacggccagcagcacgcaactggcggcgagggacaggccgagacgctggatgacgcgcagcatgaaccaggcgaacagggtcgctacccagaagtgcggcaggtaccagagcgcctgccagggcagggtgtcgaccgaggcgtacagcactccgccgatgtccggcagcagcggttggccgcgcagcaggtcgcggaggatgacgtagccgagcatggtcacgaagaacggcttgaggagggcgtcggccttgcgcagggccatctcgccgaagggttgctcggtcctgaagaacaccccggaaatgaagaagaacagtggcaggatgaacggagagagcaacggatagagcacggtcggcgaactggcgacgaaccagctgtgcccgaagacgatgatcaggatgcccacgccgcgggtcacatccatctgaatccagcgttttttcactttgcaactcccgcttgacgcgctaactcacagtggttgttcgaaggcccccagggccaggctccctacccggagccatgggtcaatcggtgcgccagggccgcagccagagcgccatgccgagcagcgccaggcagccggcgacggtgcccaggcccaattgcagccagataccgtcgatgcggaacagcaggccggcggcgagcgccatggccagggcgttcagtagccacagccgggcccagggcagggcgccgagcagggcctggcgacgcatcagcagcagcgcggtgcagagcaccccgccaagggccgcgaggggaatccccggcagtccgaaaatcaacggcaggaccgccagcagcgcggcgttcagcgcgctgccgagcagctcgcagcgcagcggcaggcgagtatcgccggcggcgtaggcgtaacgcgccagcaaggcattccaggcgccgaacaccagtggcacggcgaaccaggccagcagcgccggcaacggcgagccggcggtctgccgcggcagcaacagcgccaccaggccgggtgcggcagcgaccagcccgaccccggccggcagggtcagcaggctggcggtctccaggccgcggcgaagcagggccagacgctcgccaccctggcgtcggctcatcatgccgagcaacacctggttgaggctcatcagggcgatcagcggcaggttcatcagcttgcgcgccaggttgacccaggtcaccgcgccttcgccgagcagcgaggccaccagccgctcgaccagcgccaggccctggctggcggcgttgctcagcagcagcggagcgatgcgcccgccaagctcgcccagttcgacgccggacaggcgccagtgccagggccgccagccctcgatccatagcgaaggcagcagcaccagcggcatcagcaggctgccgagcaggcaggccagggccagttgttcgggctggctggcctggccgtgcaaggccaggtagagcaccggcggtagattgaacagcagcgagccgagcccggccaggacgaagcgctcggcggcctgcagggggatgctgaatagcgcatggagcatcagccccggcacgcaccaggcgaggacccgcaagttggccgcggcctgggcgctggccgtctcggccaggcccgggccgagcaagcgcaccagccagggcgccgccgccagcagcaggaggctgagcgccacggcgataccgagcagcgccgggaggatcgccgccagccagtcgaggcgacgttcgccctggcgttcgaggaacagtggcagggccgccgcgctgagcacgccgccggccagcgacatgcgcagggcctcgggcaggaacagggcgatgaggaaggcgtcgctgcgctcgccggcgccccaggaggccaccagcagccattcgcgggcgaagcccaggcacaggccgagcagggtggccagggtcagccagaaggcggagccgagcatctcaggcctcggccccgcgctcgagctgtcgcttgagcttgcgataacccaccgcccgcggttgcggctggcgttccgggaacagccggcgggcttccagcaggttgatcccgaccagcagccagaacaggccgatcatcaccacggcgaagctgaagtagtggtcgaacaggccgctgaccagcgccgccaggatgccgcccgtactgcccagccagatcgcgttgtcgcgggtcaggcgaatcgggcctttctccggacgggcttcgcgccaccagcgccaggtcaccgcgatgaacagcagcatgccgccgaggccgaccttgtacatgaagttcagccacaggttggagatgcccaggaggtcggtacccggcaccggcgggtcgaccttgaagccgattcccagcggatagcgggcgacggccttggggaacatccggtattcgtcgaagcgcacctcggtactggcgttctgcggcgagaagatggtcgccaggcgttcctgcaacggcgggtagctgagtaccaggaccaccaccaggccgaccccgagcaacagcaggcggccggtgtagggcaccttgcgcagggacatccagaacagcaccaccgccaggctgagcatcgccccgcgggaactggcgaggaggatcgcggcggcgccgaggaccgccacggcgaggcccaggccgcgccgccagccctggttggcgaccccgtagcagaacgccaggggcagcagcagggccatgatcccgccggtggcgttggggtgcatccatggcgagcccatccgcgaggaaagcgcctccaggccgaacttgagggtgtccaggttggcgtagttgaacatcgccaggatcggcgccatccccgacgccgagcggtagcggatgaacaccgcgatggacatcagcagcatcgccagggtgcccagcagcagggcgatgaccagggtctcgcggttcttgcgctccaccagcaggcgtccggcgaggaacacgatggacaggttgagcagccagcgcagccagttcgacaggccgctggcctcggccttgatgctgacctggccgaccacgaacggcagcacggtgaacagcatcagccacagcagcatgcgctcggtggagcggtagcgcagcgccggcgccggcggcaggcgcgagaggaagatgtgccagagcaccgcgccccaggtcagggcgaggatcgcttcgctgaccgtcgaacggatccccacgttgaccgtggagtagggcatgaaggtcgccaccagggcgaacagcagcagcccccagaacgggaagcgcaggatggtgaccgcggccgccaggccgaccatggcggcgccggccttggccgggctgagcatcagcagcgctccgccgaaggccaggccgaagacgacagcgacgaggtttcccaacgacattctcaactcagttcctcgatcagtgcggccagccgttgccggtaggcttcgcggttgaagcgcgcggcccaggcgatgagttcttccgccgaggcttcgcgcggcgcatcggccaggcgcagcatcaggcgttccagggcggcgccgtcgctgggcgagaagcgcggcgccgacggcggggtgacttcgtccagcgaggtgccgctggccaccgccaccggcgtgccgacgctcagcgcctcgaccaccggcaggccgaagccttccgcgtaggacggttgccagagccgctcggcctggcggtacagcgcgtgcagttcggcgtcgtcgagcccgccgagcgcgtgcaggccgggcaagccgcgttgttcctcgggcaggtggtcgaggctgccgaccagcaccagcggcggcacgccgggcgcctgggcgcgcgcccgggtccaggcactgacgaaccagggcacgttcttgcgcagttcgcgggtacccaccagcagccagtagcgtggcggcaggccgcgtgccgagaggtcggcgggttcgccggcgaagccgtcgacctggttgggcagcacccggactttcccggcgaccccgggaaacagccgcacagcctcgtcggcgctgtactgcgaaggggtccagacacggtcggcgacacgcagcgcataggcgatcgacaggtagtcgctgacccgatagaccagtgccttgaggcggttggcgtggtagttcttcagggtgatctggaacaggtcgtggatcagcagcgcatagcgcacgcccggcggacgcggcggtagcggcaggcccatgttgaaggtgctgatgtacaggtcgatgtcctgttcgcgcaaggcgcgtgggaggaacccggcttcgaagcgcaggcgctggtgcggctggtgcatcgcggtgcgcgggcagccccacggcgggcagaccgcccgctggcgcagcgggtcgtcgagaggggccacggtgaagcgggtcacctgcgtgccgggcaggctttccagggcctgctccatggcatagacctggcggctgatgcccgagtgcggcgagctgccgacggtgcggtagtcgagtcctatgcgcatgccggcgctccttcggcgaggccggcgtagacctgttccagttggctggcggcgacgctccagtcgtgcgcgcgacgtacgtaggcgcggccgttctcgcccagcgcgcgggcctgcgccgggtcctgcaacaggcgcaccacggcgttggcgagctgctcggcggattcgccgccgaggtagtcctcgccgtcccgcagttccaggccggaaacgccctgcgcggtactcgccagcggcagcccggcggccagggcctcgagcaccttcagcttcgaaccgccgccatggcgcagcgcggcgaggaacaccgaactgctcgattgcagttgcagcaggtcgggaacgaagccttgccattcgatgcgcggatcgctccagcgttgcgcccactccgccggcagcgcatagccgcagacgctcatgcgcgcctcggggcagtgtgcccagacccgcggcaggatctcgtcgagcatccattccacggcatcgacgttcggtgcgtattcgtagttgccgaggaacagcacgcgctgcgcttcgggcgtcggccgggcggcggcgaagtgctcgcagtcgaccccgttgaccaccactggcaccgggcgcccgagcatcgcgctgagctgccgcgcatctttctcggtcacggcgacgaccgctgccgcctggctcatcacccggcgttcccagcggcggtaacgccactggtcgtagcgcacgaagggcagcgcccagcccggcaggcggtcgtaggtggcggcaccgagggacgactcgacgttgtgctcggtgagcacgaacggctggccggcgtcgcgcagcggtcgctcgtagggctggaagctatagctgtgctcgacctggaccacgtcccagggctcgcgcagcaactccgtggcggtgcgttgcagctccgccgacaggccgttgacgctggccagcagcgggtagggcgcgaacagcgcggcgagcagcgtggagaggctgcgcagcggtcggcgcggcagcacgaccaggcgttcgaggaagggctccagggcctggcggtcctcggcgctcaccggctgcttgctgtgcagcagcacggtgatccggtggccgcgtgccgcgaggctgcgcagcaggtggtactggcgggtcttgccgccgctggtggtgggccagggcgagtagggcaggatccagagaatacgcatgggtggcttcactcccagaccagcatctgcaggctggacttcaccgggacttccaggccgtcgctgccgctcaagggcgtgaccttgccgctgagcggatcgtgcagggtggcctccttgagcttcggtaggcgcacgttgccgccgcgggccgaccagaacagccagacgttgcgaccgtcctcgcgggtccagccgatgctgaaggaaccgtcgggcaggttctcggtgaccggcgggtcggccgggcgcagcttcggcccggtgaccttgaggaagcgttgcagggccaggtagaccggcttggggttggcgtccaggtcgagcaggccgtagtcgcggtcgcgcacgctggcgcgctggtcgagatcgctgagggtgaagaggaagatccggtcgtagtccagcgcactcatcagcgccaggcgacgcagcacgtagtcggcctggccttcgacgccaatgatgtcctgcaactccttcggccccttgtaggccgaccagccccactcggtgctccagatcgccggcacgccggcgttgcgcagggcgcggttgatctggttggcgtgggagacgaagtccaggttccacgggtagttgccttccggcaactgggtataggggtggtaggtggcgatggtgccgaggctctccacgcccaggtggccgagggcgtcgaacatggtgcggccgtcgggcatctcgctgaagaaggccatgccggcggaaaccaccggcttctccgggtcgaccatgcgcagggcgatggtgctggcctggagcagcttggcgtagccttccgggtcggccttgggccgccagaagccgatcaggttgggctcgttccatacctgccaggcggccacgctcgggtagcgctgcgagagcatcgccatgcgccgggcgaagacttccgggtcgcgcggcggatactggtcctggaagggcgagtagaacggcgcggtggtgatgaagcgggccgagccgaccaggtagaacaccgacttcagctggcgcgcctcgagatccttgaccaactggtcgagggaggccagctggtactggtcctcggcggtttccaggcggtcccagtgcaggtccaggcgcacccactccagccccaggtcctgcaggcggtcgatctgcttgttgtaacgctccgggctgaaccagaggaactgcgcgttgaccccgaggaagtctttccagaccaccgcgcgaggcgccttcagtacctggatctcggcgtcggcgggacgcccccagaacaccagcagcagtaccacggcgagcagcagcgcgctgccgcccagatagagtcccttacgtgccatgaacggttcccaccatgtcgttgaacagtgcctggaagcgcagcgcggtgcgcggccaggtccgcgcatggccgatcgctccggcgcgctcggcccaggcctgtgccaggcggggttcgcgagcgaggatcaacaactgttcggagagggctgccacgtctccctgagggtagatggcgccgttgccgctggcgacttcctcggcgaaggcgcgagcgtccgaggtgatcgcgccgcgcccgcaggctgccgcccaggacagggcgccgctggtgccgcgctgctggccgagcagaccgagtttcttcgactcgcggtacggcaggaccatcacgtggtgggcctggatggtacgcgggatgtccgcggcggccaggttcaggttccagtcgatggcgtcggccaggccaagctcggcgatctgtgccttcaactggtcgaggtagttgccgccggcgccgaaggccatttccgcggcggtgccgccggccagggtcaggcgcacgcgctggcgcatctccggcgcgctggcgaacaggtcggcgagggcctcgagcaggtcctcgatgcctttgccgcgatagatgaatccgaagtacagcaggcgcagggtgtccagcgacggcagcggcaccgtggcgatctccaggttgccgtggttgatcacctcgacccgcccgggcggcaggcgcatccgccgggccaggcactcgccgcccaggccggtgagggtcaccaggcgcgtcaggccctgggccacggcacgttcttcgcgcagggtcagcgggtcggcgagcaccacggcggcctggggcaggggagagggcaggcgttccagcaggttcagcggccagggcaggcgctcgcggcgccagaccatgcgctccggatcgtgtaccgtggcgctcagcggcaggcgcgggaagcgcttgcgcagctcgcgcagggcgatgaactcgcccaggcggccgccgccgagttcggcatggaccaggtcgaaggcgttccagtcgacgctgtccagccggctggcgatattcgcgctgtcggccgccacgccggcgagcggcgtggctacttcgatgccgagaccctgcagggcgttgcggaaatgactggcgtagtcggcgatgccattcttttccggcggcaggggcgcgaggagggcgatccgcatcagaacgcgctccggtagcgggcgatggtctgcaggaccttgctcggcacctcgaagcggcgccggttgatgatgatcccgtcgaccttgccgaacgccgtggtgaggatggtcagcgcatgctcgaccaccggcacggtgctcttctgcgcctctaccaccagggcgatcaggtcggcgcggcgcagggcaatgaaggcctcgcggctgtccagcagggccggcgcgtcgagcaataccacttcacccggctgggccggttcgccgccgacccgcacgcgcacgccgttttcctccagcaggcggcgcagttgctcgatgatgaaggtcacgccttcaccgtggcgcgccgaggtcaggcccagggtcaggcccttttcctcgatgcgcgcgtagggcagcagcccgtacagccggtagatgctggcggtgaaggcgttgctgctctccgcggtgctgttgctcagctccggcagggtggtccacagcggcaggccgaatttctcctcgaccaggccgccgtcgtggatgcgctggtcgagcaggtagcagagatagaccaccagcaggccgacggcgaggccgaagggcacggcgaggaacagcatcagcagggttttcgggaagatccgcccggggttgtaggtggcttcctcgatcaccgagatgttgctgatctggctcttgtccagttcacggtcgatccgcgatttctccaggctgtcgacgtacagcgcgtagttgcgctcggtggcgttcagctcgcgctgcaggcgcgccagggtcggctcgatgtccagcgcttcgcgccgttgcgcctcgagttcagcgagctgcttttcctgctccgcgagctgggtgcgcagggccgcgttgttgctggtctcgtccagcaggacccgttccaggtgagtggtcagggtgttcggcgcgcggtcctcggaactctgcacggtggcgccttcgtcctggacttccttctccagggcacggatcgaggcgtccagggccttcaccggcggcgcatcgtcggtgtaggtgcgcatcatgtcggcgcgttccaggcgcttctggttgagcagccggcgcaggtcctgctgcgccgggttcagcgcgatctgccgcaccgtgacgatctccctgggcagccccttgagttgctggcgggtggattccaaggcgctgtcggaggaggcgatcaggcggatcgagttgaaacgctcgccgcgcagcacgttgatccgctcggacaggtcctgcaggcggtcctcgatgctggatgcgccgatctcgttgaggtgcttgaggatctgcgccttgtagctcttgatctgcgccgcgctgtcggcagtctgcgcctcgtagaaggcgtacaggctcttgcggccgagcgcctgggtgcgctcttccatgtagatctcgatccaggccttgaccacttcctgggcgacttccggctcgctccaggtgaagctgatctccatcaccgtcgagccggccgcatgggtgacctcgaatttcttctcgaggtccttggccaggcgctcgaccgcggtggtttcctcgatcacgccgaaggtttccagggtcacgcgaatcccgtcgaacaccgcgccgatggccttcttcacatagaacttggtgcgcttccacaggccctccggcggcggccggttggccagcacctcgaggtagcgctcggccacctggcggacgatcggtcggccggtgagcaggcgttcttcgtcgacgatagggtcgcgctgggtgctcggcatcaccagcgcctggcggttgctgatctcgatcggcagggtcgagtcacggcccggcttgaccagcaggcgtgcgttggactcgtacttggccggcagcaggaaggcgccgaggacgatgatcaccaccgcgctgagggccgccagcttgaactcgcgctggtagatgaacagcaggcgcaacagatcacgcaaggaacgaatttctatcatggcgatgtcgctcctcagcgatcgttgttgacggtgtagctgacgccgacgccgatggacttggcgaagggcagcaactggttcaggtagacgtcgacgccctcgatacggtcgccgaccatcgacttgggcacgaagacgatgtcgccacgctgcatggccaggggcttgcggccttccggcccgatcttcatcaactggctgaagtcgaggaagtaggcgtgatagcggccttccgagtcctcgcgcatgagcgccacgcggcgggcgtcgcccaccggcaggatgccgccggcgccgaggatcgcctgctccatgttgttggcggcggggatcggcacggccgacgggttgcgcaccgcgccgccgacgaacaccgtattgcccggcgcctggttgatgttcaccgtgacccgcggctcgcggtagatcggcgcgagcttggtggtcagctcgttggcgatttcctgcggcgtgcggtgcgcggcctggatgcgaccgatgaacggatagtagatgctgccgtcgttgagcacggtgtacagcgtcagttcatagatggtggcgacgttgaacgccgagagggtcggcatctccccggcatcgcggacgatccgcagggtgtccccgacgcgcacccgctccatcgccggcggtagcctggcgagttcttccagggcacgcttgccgctgtccacggtgtcgctgtccggtgcgggaatccgtgcgggggtgttgcatgcggccagggcgagcatggcgagcatgaggagggtgcgtttcatgagggagcacttcctgtaggtcatgatgttcacttccagtagcctggaaacatgctgatgcggcgcttgagggcgaccggcaggtggcgttccagctggccaaggcggtagccgagcagcttgaacgcgctacgcagcgctatttcaggtacgcgatacagggcaccggcggcacgcaaggcctgtatctcggcgaggacatagcgcttgccctcgccacccgcgccgccgaaggcggcacgtatccaacgctcgcggccgtagaacacgccgatgtcgaaatagcggcggaactcttccagcaagcggtaatcgtgggaatggtagacctcggcgctggccgcgtagcgcaccgcgtagccggcctgcagcaggcgcgcggcgacgtaggcgtcctcgctgccgatgacgtcttcggggaagccgccgacggccgccagggcgtcgctgcggtaggcggagaacgagtcggaactgaagcaggtcttgatccccagttccgaggcgtcggccaggcgcttgctgcggctttccggcgggtagttgaagcaccgcgcctgggcgccgagcaggccggcgccggggtgcggcaactggcggccgtaggccacgccgatgtcggcctcggcatagagttcgtcgagcaggttggcgaaactgtcgggcgaggcgggaatggcgtcctgggtcaggtagatcagcgcgtcggcctcgacctgctggctggcccagcgccgcgtcccgccgtggttgaagctggccggctcgatgacctcgacccgcgcgccgaaggcgcggaagcgctccaccgtgtcgtcgctggagcggctgtccaccaccaggatgctgtccggctgccgccgttgcgcggccagggccggcagcagccggtccaggtgcgcgccggcgttgcgcgtgggaatgaccagggcgcagcgcatcaggctttcttctcgtcgctggcgggggcgcgaccgtagatgtcgttgaagcggacgatgtcgtcctcgccgaggtactcgccgctctgtacctcgatcatcaccaggtcgatgatccccggattgctcaggcggtggctatgcccggcggggatgaaggtggattcgttggtgttgaggagaaactcgcgctcgccgttctccaccagcgccatgccgctgaccacgatccagtgctcgctgcgatggtggtgcatctgcaacgacagcgaagccttggggcgcaccacgatgcgcttgatcttgaagcggcggccttcctcgagcacggtgtaggtgccccagggccggctgaccgtgcggtgcaggcggaaggcgtcgtggccgcgacgcttgagttcctgggcgacgaacttgacgtcctggctgcgcgccgcgtcggccaccagcagggcgtcgggggtgtcgacgatgatcaggtcgtgcacgccgacggcgccgaccaggcgtttcggcgaatcgatgtagcagttgctgacgtcgtgcagcacgctttcgccgcgtacctggttgccgttctcgtccgccgcgctgagttcgcgcagcgcctgccaggagccgatgtcgctccagccgatggagcagggcaccacggcgaccttgtccgagcgctccatcagcgcgtagtcgacggagatgtccggcgcctcggcgaaggccccggcggccagctcgcgctggcggcactggccgttctccaggctgctgccgtcggccagggcggcgcgggcggcgatcagcacctccggcgcgtggcgctccagttcctgcaacacggtggcggcctggaagcagaacatgccggcgttccacaggtacttgccgctgtccaggtaggactgggcggtggcctggtcgggtttctcgacgaagcgtgcgacccggaagccgttgcccagcggggcgccctgttcgatatagccgaagccggtctcggcgcgctccggggtgatgccgaaggtcaccaggtagccttgggccgcgagtccgcgagcctcggccaccgccgcggcgaaggcctgctcgtcgcggatcaggtggtcggcgggaaggatcagcaactgcgcctggtcgccgaagtgctcctgcacatgcagcgcggcggcggcgatggccggcgcggtattgcgtcccatcggctccagcagcaggtcctgggccaggccgctgcggttgaccgcgcggtagtcgtccagggtacggaacagcaggtcgcggttggtcaccgtgagcaggcgggcgacgtccggcagcccggcgatacgcaggaaggtcttctgcaacaggctctggtcatcggccaggcgcatgaagggtttcggcatgctctcccgggaaaccggccacaggcgggtcccggaaccgccggaaacgatgcaggggatcagcggggcgacggcgttcatcagtagacttccttggtcaggagtacggctggcaccgtacggaacaggatgtagaggtcgaaccacaccgaccacttggcgatgtattcgaggtcgtattccacgcgtttcttgatcttgtgcagggtgtcggtctcaccccggtagccgttgatctgcgcccagccggtgatgccgggcttgacccggtggcgcgagctgtattcgctgaccgcctcctcgaagggaatgccggcggccttggtcgcggtggcgtgggggcgcgggccgaccatcgacatgctgccggcgagcacgttgaacagctgcggcagctcgtcgatgctggtcttgcggatgaagcggccgacccgggtgatgcggtcgtcgtcgcgggtggtctggcgtcggtcctttccgtgtacatcgagcggaacttgaagacccagatcaaccggttgttgtagccgtagcgtttctgccggaacagcaccggccccttggagtcgagcctgatcgccagggccaccagggccatcagcggggcgaagaggaccagcgcgatgctcgccaggaccagatcctcgcagcgcttgatcagcggcgaccagccgcgcagcggcagctcggacgcgttgaacatggggatcccggagacatcgacgatgcggttgtgggcatgccggaaggcagccatgtccggcaccagcaggacgttcaccggcaattgccgcaggcgatggacgatggcgccgatgcgcccctcggcgaaccagggcagggcgaccagcacctggtcgacctgttcctggcggatcagcttctccaggtccttggtgttgcccagcagcggcagcgagttgtagttctccgggacccgctcggagcggtcgtcgatgaagccgatgatgccggagcggatgtcgtggttgcgtaccaggtattcggccaggtgcatgccgctctcggtgaagccgaggatcaccgtccgttgcaggtacatgccgcgtttcatccaggcccggtacaggcgcagcaccagcaggcgctgcacgccgaacagcagcaggctgccggtgaaccagaagatcaccagcttgctgctgaggtagggaaacaggcccaggccctggtacatgaacaacagcaggcagaacgccgaggcccaggcgaagaacatgatgcggaagcgcaggcggttgctgaagatatcgtcggagtagacgtccagtgcctggaacatgatcaccgtgagcgcgccgaagaacagcagcagcccgagcatgttgctgcgcagctccacgggaaccaggccggggtagtacagcaggaacagcgccggggcgatggcggtgagcgcgtgtaccagtttggtcgcgaccaggaagtactcgatgaatccagcccgtgtcagcgacaggctatctaccgacttcgaatgcatgttgtttgctctgccgatcacgggcagtccattgagtggatagggaagagcaaggcggtgaagcgtcaatttagtgactatttttcatttgccacgcggtttagtcattttcccgtcgaataggttcattcgtcgatagtggctttgtgatagctatcttagcattcccagggaaatatccgtagtctgggtaagtttttttagtcaatttattgacgtatttctggcgccaaacttttatccaaacagtagacgaggaaatctgacgccgccaatccgcgagcgctctggcctgggaagcgaagcggggcgaaaggtgagggcaggccgctcggccaggtggccagccgccggttcgacgacccgcctgtccactggcgctgcgggctgcctgggcaggatgcgcctgcggttccatgacgcaggttggccgttcgagcgtgccggtccgacctggggggcttggcggacgtttgccctcgtcgaagacggaagaggttcgggcccgcggcgtgcgcggacggctctaccagaaccagccgccgcgcgacagctcctgctggcaactgcggtactgggcgccgaacagcgaggcgcgggactggaccttctgcgagacgttcttcagccatggcttggcgtcgtagctgcggttgcggtagccgccccagccctcgtggtagttcaggtactggccgtaggcgtcccacttggagacgccgttgacccgctggctcttctggatgtaccagcccatgaagtccagggcgtcggcgaagtcgtcgcggctggcgccccagccgccggcctcgcgcttgtagtcggcccaggtctcgtccttggcctgggcgtagccgtaggcggagctgacccggccccaggggatgaaaccgaggaagtagtagcgcggcggcagggcgtcatgcttgaaggaagattcctggtacatcatcgccatcggcacctggaccggcgcgccccagcgctgctgcatcttcagcgccgcctcgtgccatttcggtttttcgcggaagatctcgcagaggttgtcgggattggcggggggcttggtggcgcagccggcaagagccaggagcagggccggcatcgagagccgcagcatgaaaggggtcctttggcagacgtctgggtcgcttaacgctggcgctttatacccgctttccggcactccatgcatccccaggccgattccctgcctgcggggggggcatcggcgcttcctcaggtcggcctgggcgtctcggcctggccgggggctccctccaggcgcggcccccagtcctcgacctggcctttttccaggcgccgctccagggtgcgccgccaggatggcgtcagcggcagcgccaggcactggcgcagcagctcggcgtcggcccgcctgtcgaacagcacctcggacaggcgcaacaacgaccagtccggatggcgccgttcgaccagttgcaggatatcgccagccgccaccacgccttcctccagcacccggtagtaccagccggtgcgcccggactcctgcaccctcagggacatcccggcgacctcgaagcggtcgttgagcttccagcagggcatgcgcccctgggacacttccagcagcgcggtcccggcccgcacgcggtcgccgaggcagacgtcggcttcgctccagccgctggtgctgaagttctcgccgaaggcgcccgcctgcatcagcaggggatgttcgcccagttcggcgatccaggcggcgtagtgttcgcgcggataatggtggatcgccttctcgacgccgccatggacgcgcaggtcgccctgttcgtcgccttccaggccgacgggggtgaccctgagcgcaccgtcgcgcggagacttggcgatgccgctgcgcgagccggggcgggtgaagggccgggcgcggccggtgagaagggcatccaggggtagggcaggcaggggcatgggagggttctctaagatgcaagatggtatcgactaaatacaatatagagtccgccaagccttcgcccgctgtcaagccgccagaccctccggatgcgtcgatagcctcggcgggccgggggcatccaggccccctagttgagctgccgtggggtcccgacaggaaaccgcaaaggcgccggacgtcgcgatacgacgtccggcatcggcggccctcagcgcagcccgtagcccttgtcgacgatcaactcctggccgtagagcccggcggatttcgacgacagcaggaacatcaccacgtcgacgatttccccggggctgaggaagctgccgtcgaccaggcgctggttgatgctccgggtgacagactccgcctgggcatcgctcaggcccagtgacgcccatatcggggtggcggtagggccgggggagacgaggttgatccgcacgcctttttccgcccattccaccgccagcgtcctggcctgggcgatcagggccgccttggaagcgatgtaggcggcgagcccgggaaaggtcacttggctgaggaaggtaccgatgaagactacgctggccggtttgctcgtttgccggctgagcacggaaaaggtgttcagcgccccggcgccgttgacccgccactgctgctcgaacgccaggctgtccaggccgtcggcgagctgggcgatgccggcgttgggtaccaggtaatcgacggggccgatggacgcggcacgcgaagccagggcgtccaggtcccgttcgcgggtgacgtcgcccgccagccagtgcagacgcttgccggagtgggcgtgcaggctttccggcggtccttcgcgccttgccatcgccaggacagtcgcgccgtgcccgagcaacgtttcggtcagtttcaggccgatgccggaactcgcgccggtgacgacggcgaaccggtcgttgaattcactcatgggaatccctcgtggggtgatggagatacgggtcttcgatagggatggatcaacgcgagagcgacggggcagggatgaggcggatgccctgtacctgcacctggtcgccggcgtcgaaccgggcgttgggagagcggaagcgttcggtcgtgccgtcctcgtagcgaacggtgtaggcgttttcgctcagaccggttgcctgctggacggaggcgcctcccagggctcccagcgcggccccggcgatagcgcccaggggaccgccgagggccgcgccgaccatgacgccaaccacgccgccggcgccgtagccgaccgttcggtccctatctgcggaaatcacttcggcggagtgggcgaggggagtcgtggttgccagggccagtgcgatgagggggagcatgtgtttcatgggaaatcctgaatgggaaggagtcgccattggctttccatttcccatgccaggttttttattgatgtagatcaatgatttgaaggtttatgagtcatattgacacgatctttttgcggtcgtaatgacccgcatgtagtcggtttgactctgcgccgatgacagtttcgggcgcttcggaacggcctcgtcgatgacgctcaacgatcggggcgagcggggcattcgaccgtttgagcaggcccgcacgatcgggcaaggactcccgaggaataggcaatgacgaggaggggaggatgcccaatagtgaccgcgaacgaatgccggcggctgcgctacggttgtcgaaatgccagacaggaataatgacgctttgaaacttccctcgatacggcgagccgccatcggcggacatcacgattccccgcaattgcgccaggggcgtttccacaatctcagccccaggccggcggacatgccggcacccggtgcccgggtgctctggaacgcacttttcaacaagccgagaagcaccgtcccgcggcagcctttacccgtgctcagcccgagtcgtgccgagctcgatgcgaccgtcgatggcagtctgttccgcctgggtcattcgaccttgctgctgaaactggccggtagctggtggttgaccgacccggtattttccgagcgcgcctcgccgttgccgttcgccgggccgaagcgtttccatgcgccgccggtggcattggcggatctcccgccgatccgtggggtaattctttcccacgatcactacgaccacctggaccgcgccgcgatcaaggccctggtcccgctcgtcgaactgttcctggcgccgctcggcgtaggcgaccgcctgctggcctggggcgtaccgccaggcaaggtgcgccaactggactggtggcaaggtatcgaggctggcggtttgcgcctgactgccacgccggcacagcacttctcaggccgtgggctacatgatgggaaccgtacgctgtggtgttcctgggtgatcgaaagcgccgaactgaagctgttcttcagcggagacagcggttacttcgatggtttcgccgaaatcggccgccgctacggaccgttcgatctgaccatgctggaaaccggcgcctacaacgaacattggccgtacgtgcacatgcacccgcagcagaccctccaggctcaccgggatcttggcgggcgctggctgctgccgatccacaacggcaccttcgacctggccatgcatgcctggtacgagccgttcgaacggatactcgaactggccaccgaacacggcgtgcgggtttccacgccgatgatgggcgagcggatcgacctgcaagcaccgcatgccggccgacgctggtggcgcgaagtggtcgacagcgaaacgcaggtgcagggttacggctgttgcagaagctaggtcggcgagcgatcgcacgagggctccagacggaagccgccatggagtcgcttcgaaatgcgtgatgctgccctaggtcctgtgaacctgtagattcgcataatgacctcggcgttacgttacctgcggcggccgcaggccgaatgcgaagcccggaaaatcgccccgcgccgggcgagcatttacacgtaatgcccattatgcgaggccgcttttggtaccggcagaggatcctgcagaacgacctggtcgaaaatattggtaccatttttcggtggtagtggtaccattttcgtcgagctcgagcacgacctggtcgagaatacggtaccaaaaggagccgccatgcttgtcaaactccccgatgaatcccccgacttcgtagagaaactcaaggaacagaccggtgcgaccacggctgccggtgcctatcggttcgccgctgagcggtacgggtcgctgacctatcagctcaagcaagccatggacgaactggcgaggttgcagacccggtgcaacgtccagcagcagatcatcgacaacgcccgcgcttctgcctcttcgctgcttgaccacgtcgcccagggcgatcttctgcaaagctgacagcccctcgaagctccggcaggtcaagggccgcgaccccggcttgtcagcgcttgcggtgacaaacggagtcccgggcggagcgaacccttgaaccacatcggacaaagacagcctccggtcatagggtagggggaagcttttctccccctgccctctgaccccctggcgaagggcagggatgacaagggacagcgtcccttggtgttgatgggtgggtgttgcggagggggggccgggagcgatcccggcgcagccgggtccaccatctctaatggtggacttttgtctcatggtgagactttccggggttacatgtgctgctggtgaaggatcatcaagtgacctttcagggcacgccttatctcggcctgatcttgctcggggagccgggttatttctttgaagagggcgaccaattctgcgggtacagatcgttgatctgtctcgaaaattatctcgtctgcggacacgcctagcccgcttgcaaggttcgcaattttgtccgccgtgggaaggttcgccccgctctcgtacttcttcagcattgatagcgaaatgccacatcgggcagcggcttcttcttgtgtgaaacccttggcctctctggctttcctgatgttctgcgcaacggtcatttcgttgtgtctcagctggcctagtcggtgaatcaatcgtaatccccccttttttcggtggtcccatatcgcgaactataagggacaagatacgggttgcattacttaaaccatatgttgtacttttgcgatcagtatccgggccttgacgggtttcccatgctggacaagttgcacctcttcgttccgttccgcctcgagcacatcgaactgctcggggtggaagggcgtgcggatccggtgcatgtcgtggatctggaaagcctgggcgtgccgctgcaagggcagatcagccgagggcagggcggagagctacaggctgactacctgcggcacgcctgggagtcactgagtacgggcttcacgcctttggcgttcaaggtgtttcaccagtccctgggcaagcgcctgatgcccggcgtagagctgaaggccagcccggcgaagttgctccagggacacaacgtgttcggcccaacatgcatcgagaagggggccgaggtgatgttcaagtggctagccggaagctacccggacctcttcgcgaagctcgatgtgtcagcgacgcaggtctacgccctggactgcacgtattccagccgactgccggacgaacgcacggcgctccaagtcattcaggcgctgaccaacgtcagcaacggccacaccaagagtcgcggcgacaactatcagacgtccgcctactggggagcgaaagagtcccgtctgaagcgcctgaaggcgtatctcaaaacacaccgagtttcaggcccagttggacgaattgaagcgggcagggcgggccgatctgtcggccgctcggtctgctcgggtcatgtctgacccacggttgcaggagtgggtgcgctacctgctccgcatggaagccacggtgatgcaccggtggctggaacgccggggcatcccgtctcggcttgttgatctgatcgcctaccagcagcggctccagaaagaggggcgctgcctgattcaggagtgctggcaagcggttacagcggaccttttcgcggcctttgagggtatccagatgcgtgtgattgatgatgaaaaagtgctggccgcactgactgagcgacacctgaagtacgaccggaagggcaagcccaacgatagccacgctcggaacctgtttcggacgtaccgcagtctcaaggactacgggtggcaggaaacgatggactccatggtctcgcccgacgttctaccggcacatcaaggaaatctgcgaggccgggctgtcgaaagccgccctgcagaagctccacgaagccgaccgggcgaacaacgttgtgccgctcctgaggttcgtccaagtcgatttcagcgcccagcgccccgactggtacgtcgagccgaccgtggaggccgcgtgatgctcgcgcctactctcgaagccctcgcgctgctcgccggtgccgcaaccctcattcacgccctgggcgtgtggggcgcgcagcgatggataaggcgacccatcagcaccttcgtttcgacctggagcaggacatttcccgcctgctcgatgacgagcacttggtgcgccaggtcttggacctggtcatgcgcagagtcgtccgggaacaggccgccgaggcagttcgccggcagcgcatcaaccgagatttcaagacgttccggcgccggagcgtgacgccgcccgcatgggcatttcgtgaaccgggcacaagcccacaagttgaacccctgaggtaattcatatgctcgctcttatcggcctgtgccagggctattactccgatactcgcaacgtcaataccgccaacggtccttcgcagattgttgagcactccggtgctcgtgcaggttgagcaaaccaataagttcggtatgccggaaaaccaaggttattcaagtccgcatttcgaagcggcacatggatggcgggcttaataatgtctggaagatggagaagggcaaaactgtgtccgtcccggtatttatccaggcctgggcgagtaagtccggtaacgccggattcgattattggctgtcgggcgacggcatgccgttgaaacttcaaaccgttcaggagaaagccgcttaagggtcccggcctttttcggcgaaaaaggacgggtaggggacaagcatgaattttttgggctgtgacggtgtttggctggccagggaagatggttcaactatctgccagggtcaaatgaagacttttacggtccaggaaatgcgggagtttctgactcctgcaatgacaattgcgcagaaagctcaaatcaccggcgggctgttgacgttgtttgtcgcggtctgggtgtttaagaagatgcgcacatcaattccacactaggagtaagtccgatgaaacaactgaaacaactgttctccctgggcaagcgtgaagccgttatcggtggctcgttgctgatgacgtccggcctctcgatggccgccgagggcgatatcgacaccactaaggccctggcctatatcgcgggcggtctggctgctgctgcggctgtgactggtgccatgttcggcctggttgccctgatcggtgcggccaagaaagcccagcgcgcagggacctgatcgaccctcagtcaagccggtggcggtcactccgccccggcttttttattgcccggagaaaggataaatgaggattaagaaatgtatatcagccctgaggatatcgctttttatggcgtgcttattgccctcgctattctttgctcagggcgctaggtctgaaaattattattggcaattaaatggcccgacctcccctgagaagtttggcagccctggtgcggcttgtgagttcggactgggaatctataaggctcagtatcccgccgtcgaaatggtgataggttcgcgggaaatgaagaactcgaccaactatgtgtgcatggtgtttcgttatttcaatgggggtcgtattgagccaaattttacgatttccgttgttcgtagaggtacggcctgtcctgcgggggctacgtacaatgaacagaaggggacttgtgatgagccgccaccgtctgagtgtgaaaaaggtcagccaaatttatttagaagttcgaactatccgatcattgtcatcaatggaaaaaacacggttcctagctctccgccgtctggctgtttgaatgggtgcgcttatgaggctgatagttctcgaccaaattcttgttatcgcactccaggctctactactgagggattctgtaactacacactcaagagcaacggtcagaattgcgcgacagattccggcaacctgggcggtactggtccttcactcaacgaaccggatcagccgccagtcactgatccgccttcggacccgaacgacccgggctgtccgaaaggctatagctggtccggcactacgtgcgtgaagacgccgactgatcccactgatccgaccgacccgaaagaccctggtggtggcggtggaactggtggtggcgatggtggcgggactggtggcggtacaggcggtggcggtgatggcggaacgggcggcggcgatggcggcagcggcgggggagacaacggtggaactggcggcggtgatggcggcggcacgggtggcggtggcgatggcgggggagacgggcagtgcgatccggcaaaggacccgaacaaatgcggcagtggctcctcgatctccggtgacggtgactgcaaggttgcgattcagtgcaacggcgacgcaatccagtgcgccatcgttcgccaggaaaaggccgcccgctgcgcggatgaagagttccgtacggtcgatgacaagaagattcaggacctgaagaacacgctggccggtgagttctccgggcctgagtacgaacccatcaaggccgccggcgagaacacccatgacctgtcgaagctgctcgacactagcgggcgcttctccaaggcctgcccggttattcctgacgtctcgttcccctggttcggcagtactcagacggtgtcgctcagtagcgtgtcgtctgatctgtgcacgtacctccagtggttcgggtatctgctggtcgcgttcgccatgcgcgccgcggctgaaatcattgcgcgagggttgaactgatgccgttactgatcggggtactactgcgggccatcggctggtcgctgatcccgctgggttggaagctgctgcgcggcctggggttcaccgctgttgctttcgttggccgtcaaggcggtgatggatcagcaaaggactacgtgttcagcagtctcggtggcgtgccttgcgcaagtggcttcaggtcctggggcttctgcaagttgacgtgtgcatcaacatcctgttctccgcgtacatcgctcgcgccgtgctgtggggtatgggacaagtctggcggcaagtctggcatgcgctggaccgggccgaagtaagcgaggagggaccgatatgctctatctgcgcaccggcctgccaggcgctggcaagaccctgaacgcgattcgggaaatcgaattgaacaccagccggacccggacgacccgaccaagcggttgcacaaggacccggacaatccagacctgccgcccaggacgatctactactacggcacccggatatgaaacttgaccgctcaagtcgaagtgggtcgagttcgatacgcccgaagagtgggtacagcctgcctgatggctcggtgatcgtgattgacgaagcgcaacgggtgttcggcaatgatggctccagggcgcgcccggagaaagtcacgcgcttcgagacgcaccggcaccagggcctggacattcatctgattactcagcatcccagcctgctgtgcacgccagtgcgcaagttggtcggcaagcacatcaacttcattcggccctatggccgggagaaaggcatcttccggcatgagtacgagttctgcatcgacaacccggagcggcgcagcaacttcaagcaggcccaggaagagcgggtcacgctggataaggcgtatttcggtgtctacaagtcgtcgacggtgcacacgcacaagccgatcacgcccagctacatgaagaaaatcccgctgatcatcgcgctgatgctgattccgatcggcgtgcttgttgggcttgtcgtgaccgcgatgcgtcaggggaatgaggagaaagaagcggctcttgcgagaagccaagcgactgaagcgtcagcgggtgttctgcctggggctggaaatgctgttcaggcagcccccagggcctccagtgcgccgaaatcggctgacgaattcatcggtgatatgtcgcccagggtgcccgatctggtggtctcggcgccgcgctatgacgatctgaacaagcccagggatttccctcggccggtctgtgcggccagcgcggacccgaacttgatcggcaaggctcctgagcgtcggattccgctgggcacgtacaatggccgggtgatggtctgccagtgctacacgcaacaggtcacgcggatgcacacgacgttcgagttctgcatggacgtggtgaacaacggctatttcgacgacacgcggatgccgccgacctatgccagcggcaacagcacgcgaggcttgatcaccagtccgtcagttgacccggcgacggcgattgagcgagggcgcgcagcgacatcgccgacgccgggggatgcgttctcgacacgagtaaccatcgtgccggatagcagcaggatgcccaggacgctatgagcgatgtgagcctcttggctcaggggttcttatccctggcttcgcataatgacctcggcgttacgttacctgcggcggccgcaggccgaatgcgaagcccggaaaatcgccccgcgccgggcgagcatttacacgtaatgcccattatgcgaggccgcttttggtaccggcagaggatcctgcagaacgacctggtcgaaaatattggtaccatttttcggtggtagtggtaccattttcgtcgagctcgagcacgacctggtcgagaatacggtaccaaaaggagccgccatgcttgtcaaactccccgatgaatcccccgacttcgtagagaaactcaaggaacagaccggtgcgaccacggctgccggtgcctatcggttcgccgctgagcggtacgggtcgctgacctatcagctcaagcaagccatggacgaactggcgaggttgcagacccggtgcaacgtccagcagcagatcatcgacaacgcccgcgcttctgcctcttcgctgcttgaccacgtcgcccagggcgatcttctgcaaagctgacagcccctcgaagctccggcaggtcaagggccgcgaccccggcttgtcagcgcttgcggtgacaaacggagtcccgggcggagcgaacccttgaaccacatcggacaaagacagcctccggtcatagggtagggggaagcttttctccccctgccctctgaccccctggcgaagggcagggatgacaagggacagcgtcccttggtgttgatgggtgggtgttgcggaggggggccgggagcgatcccggcgcagccgggtccaccatctctaatggtggacttttgtctcatggtgagactttccggggttacatgtgctgctggtgaaggatcatcaagtgacctttcagggcacgccttatctcggcctgatcttgctcggggagccgggttatttctttgaagagggcgaccaattctgcgggtacagatcgttgatctgtctcgaaaattatctcgtctgcggacacgcctaagcccgcttgcaaggtttcgcaattttgtccgccgtggaaggttcgccccgctctcgtacttcttcacattgatagcgaaatgccacatcgggcagcggcttcttcttgtgtgaaacccttggcctcctctggctttctgatgttctgcgcaacggtcatttcgttgtgtctcagctggcctagtcggtgaatcaatcgtaatccccctttttcgtggtcccatatcgcgaactataagggacaagatacgggttgcattacttaaaccatatgttgtactttgcgatcagtatccgggccttgacgggtttgcccatgctggacaagttgcacctcttcgttccgttgccgcctcgagcacatcgaactgctcggggtgaggcgtgcggatccggtgcatgtcgtggatctggaaagcctgggcgtgccgctgcaagggcagatcagccgagggcagggcggagagctacaggctgactacctgcggcacgcctgggagtcactgagtacgggcttcacgcctttggcgttcaaggtgtttcaccagtccctggcaagcgcctgatcgcccggcgtagagctgaaggccagcccggcgaagttgctccagggacacaacgtgttcggcccaacatgcatcgagaaggggccgaggtgatgttcaagtggctagccggaagctacccggacctcttcgcgaagctcgatgtgtcagcgacgcaggtctacgccctggactgcacgtattccagccgactgccggacgaacgcacggcgctccaagtcattcaggcgctggaccaacgtcagcaacggccacaccaagagtcgcgcgacaactatcagacgtccgcctactggggagcgaaagagtcccgtctgaagcgcctgaaggcgtatctcaaacacaccgagtttcaggcccagttggacgaattgaagcgggcagggcgggccgatctgtcggccgctcggtctgctcgggtcatgtctgacccacggttgcaggagtggtgcgctacctgctccgcatggaagccacggtgatgcaccggtggctggaacgccggggcatcccgtctcggcttgttgatctgatcgcctaccagcagcggctccagaaagaggggcgctgcctgattcaggagtgctggcaagcggttacagcggaccttttcgcggcctttgagggtatccagatgcgtgtgattgatgatgaaaaagtgctggccgcactgactgagcgacacctgaagtacgaccggaagggcaagcccaacgatagccacgctcggaacctgtttcggacgtaccgcagtctcaaggactacgggtggcaggaaacgatggactccatgtctcgcccgacgttctaccggcacatcaaggaaatctgcgaggccgggctgtcgaaagccgccctgcagaagctccacgaagccgaccgggcgaacaacgttgtgccgctcctgaggttcgtccaagtcgatttcagcgcccagcgccccgactggtacgtcgagccgaccgtggagccgcgtgatgctcgcgcctactctcgaagccctcgcgctgctcgccggtgccgcaaccctcattcacgccctgggcgtgtgggcgcgcagcgatggataaggcgacccatcagcaccttcgtttcgacctggagcaggacatttcccgcctgctcgatgacgagcacttggtgcgccaggtcttggacctggtcatgcgcagagtcgtccgggaacaggccgccgaggcagttcgccggcagcgcatcaaccgagatttcaagacgttccggcgccggagcgtgacgccgcccgcatgggcatttcgtgaaccgggcacaagcccacaagttgaacccctgaggtaattcatatgctcgctcttatcggcctgtgccagggctattactccgatactcgcaacgtcaataccgccaacggtccttcgcagattgttgagcactcggtgctcgtgcaggttgagcaaaccaataagttcggtatgccggaaaccaaggttattcaagtccgcatttcgaagcggcacatggatggcgggcttaataatgtctggaagatggagaagggcaaaactgtgtccgtcccggtatttatccaggcctgggcgagtaagtccggtaacgccggattcgattattggctgtcgggcgacggcatgccgttgaaacttcaaaccgttcaggagaaagccgcttaagggtcccggcctttttcggcgaaaaaggacgggtaggggacaagcatgaattttttgggctgtgacggtgtttggctggccagggaagatggttcaactatctgccagggtcaaatgaagacttttacggtccaggaaatgcgggagtttctgactcctgcaatgacaattgcgcagaaagctcaaatcaccggcgggctgttgacgttgtttgtcgcggtctgggtgtttaagaagatgcgcacatcaattccacactaggagtaagtccgatgaaacaactgaaacaactgttctccctgggcaagcgtgaagccgttatcggtggctcgttgctgatgacgtccggcctctcgatggccgccgagggcgatatcgacaccactaaggccctggcctatatcgcgggcggtctggctgctgctgcggctgtgactggtgccatgttcggcctggtggccctgatcggtgcggccaagaaagcccagcgcgcagggacctgatcgaccctcagtcaagccggtggcggtcactccgccccggcttttttattgcccggagaaaggataaatgaggattaagaaatgtatatcagccctgaggatatcgctttttatggcgtgcttattgccctcgctattctttgctcagggcgctaggtctgaaaattattattggcaattaaatggcccgacctcccctgagaagtttggcagccctggtgcggcttgtgagttcggactgggaatctataaggctcagtatcccgccgtcgaaatggtgataggttcgcgggaaatgaagaactcgaccaactatgtgtgcatggtgtttcgttatttcaatgggggtcgtattgagccaaattttacgatttccgttgttcgtagaggtacggcctgtcctgcgggggctacgtacaatgaacagaaggggacttgtgatgagccgccaccgtctgagtgtgaaaaaggtcagccaaatttatttagaagttcgaactatccgatcattgtcatcaatggaaaaaacacggttcctagctctccgccgtctggctgtttgaatgggtgcgcttatgaggctgatagttctcgaccaaattcttgttatcgcactccaggctctactactgagggattctgtaactacacactcaagagcaacggtcagaattgcgcgacagattccggcaacctgggcggtactggtccttcactcaacgaaccggatcagccgccagtcactgatccgccttcggacccgaacgacccgggctgtccgaaaggctatagctggtccggcactacgtgcgtgaagacgccgactgatcccactgatccgaccgacccgaaagaccctggtggtggcggtggaactggtggtggcgatggtggcgggactggtggcggtacaggcggtggcggtgatggcggaacgggcggcggcgatggcggcagcggcgggggagacaacggtggaactggcggcggtgatggcggcggcacgggtggcggtggcgatggcgggggagacgggcagtgcgatccggcaaaggacccgaacaaatgcggcagtggctcctcgatctccggtgacggtgactgcaaggttgcgattcagtgcaacggcgacgcaatccagtgcgccatcgttcgccaggaaaaggccgcccgctgcgcggatgaagagttccgtacggtcgatgacaagaagattcaggacctgaagaacacgctggccggtgagttctccgggcctgagtacgaacccatcaaggccgccggcgagaacacccatgacctgtcgaagctgctcgacactagcgggcgcttctccaaggcctgcccggttattcctgacgtctcgttcccctggttcggcagtactcagacggtgtcgctcagtagcgtgtcgtctgatctgtgcacgtacctccagtggttcgggtatctgctggtcgcgttcgccatgcgcgccgcggctgaaatcattgcgcgagggttgaactgatgccgttactgatcggggtactactgcgggccatcggctggtcgctgatcccgctgggttggaagctgctgcgcggcttggggttcaccgctgttgctttcgttggcgtcaaggcggtgatggatcaggcaaaggactacgtgttcagcagtctcggtggcgtgcctgcgcagtggcttcaggtcctggggcttctgcaagttgacgtgtgcatcaacatcctgttctccgcgtacatcgctcgcgccgtgctgtggggtatggacaagtctggcggcaagtctggcatgcgctggaccgggccgaagtaagcgaggaggggaccgatatgctctatctgcgcaccggcctgccaggcgctggcaagaccctgaacgcgattcgggaaatcgacattgaacaccagccggacccggacgacccgaccaagcggttgcacaaggacccggacaatccagacctgccgcccaggacgatctactactacggcatcccggatatgaaacttgaccggctcaagtcgaagtgggtcgagttcgatacgcccgaagagtggtacagcctgcctgatggctcggtgatcgtgattgacgaagcgcaacgggtgttcggcaatgatggctccagggcgcgcccggagaaagtcacgcgcttcgagacgcaccggcaccagggcctggacattcatctgattactcagcatcccagcctgctgtgcacgccagtgcgcaagttggtcggcaagcacatcaacttcattcggccctatggccgggagaaaggcatcttccggcatgagtacgagttctgcatcgacaacccggagcggcgcagcaacttcaagcaggcccaggaagagcgggtcacgctggataaggcgtatttcggtgtctacaagtcgtcgacggtgcacacgcacaagccgatcacgcccagctacatgaagaaaatcccgctgatcatcgcgctgatgctgattccgatcggcgtgcttgttgggcttgtcgtgaccgcgatgcgtcaggggaatgaggagaaagaagcggctcttgcgagaagccaagcgactgaagcgtcagcgggtgttctgcctggggctggaaatgctgttcaggcagcccccagggcctccagtgcgccgaaatcggctgacgaattcatcggtgatatgtcgcccagggtgcccgatctggtggtctcggcgccgcgctatgacgatctgaacaagcccagggatttccctcggccggtctgtgcggccagcgcggacccgaacttgatcggcaaggctcctgagcgtcggattccgctgggcacgtacaatggccgggtgatggtctgccagtgctacacgcaacaggtcacgcggatgcacacgacgttcgagttctgcatggacgtggtgaacaacggctatttcgacgacacgcggatgccgccgacctatgccagcggcaacagcacgcgaggcttgatcaccagtccgtcagttgacccggcgacggcgattgagcgagggcgcgcagcgacatcgccgacgccgggggatgcgttctcgacacgagtaaccatcgtgccggatagcagcaggatgcccaggacgctatgagcgatgtgagcctcttggctcaggggttcttatccctggcttcgcataatgtatattatgttaaattatgtaaatcgtttattagacccttgctcttttgcgctccgttcccgcttccatgcttggtttgaagccttcagtcgagtcccacacctcgacggcttgctgcccaggttaaatcccggacagacttggcagcacccgcacaagacctctgctacctccttcgcacggagccgattgcaacaatgcggtatcgcccgacacggacccgacatgagcaaatgcccgtccgcacgctgaatatcgcgcagccatgaagctgcatctgtaccgcggctcattggccccattttcaccctgtgccacgtactcgcagcctgccggctgctctggcactccgtctggacaatggattggcaatcaacagtcgaatggatagatcgacgttgaatgcattgggacgacgtccgctgtcttgagtcgaaaccggaacatgacatgaagatgaaattgtaggtatgttccattgacgatgacggcgctgctgcggcaagcgccgtcctgcattgaatattcaaaaagtgttctggcgggactcatctttctattcgaagatgaaacgagcaggcaaccatagtagaaggacgacggatgtcacctagcccctcccccgacgagcgtcggcttgtattcgaagcgcgccgactgaccattgaagcactggtgaaaatctatcttgagcaggtttcttcctcaaggaacctggtgacggtctaccttcgcctcatgttcactttgtcactcggtgccctcgccggcgtgataactctatatgggaccatgcttcgctttggcacttcggccagtatcagcatgatcactcccctggaggtggttcttgctatcgcagcgcttgcggccctggtcacttcggctctgctttccgcgcgggcgctccagaaaagtgcattcgatgtcgctccgctcttgcataacccatttccaagcgcggactcggtgatcgattcaatattcgatgcagacgatatcgatgagcggcaaatactcagaaagctttatttcgccctggacaagactgtcgagcatcagcctcctctcaggctcagcactcgtctgatcaccctcttccttattggcggtcttttcctgaccggggcatcctttttactgtgaagagcgcgttcggtctttatggttatttatcatcatcgatcaggggagtactccagatcaccagttcaagggccgcggcgatctgaatgcgatgatcggcaagccggacgggcaacaggtcctgggcacgctccagccggcgcagcaatgtgttgcgatgcgtgcccagcgcttctgcggtctgggtgacattgcagccattggccaggaaggcgtgcagcgagcgctgaagcaccgaaggctccgtcgccagccgccccagggtgctcaagacgaactgcctggccgcgcggtcgtcctgggtcatcagcgacaccatcctcacctggtcgatggtggcaacggcgggtgcgcccgccaggcggcccatcagcctttgcgtcgtcagggcctccagatgcgagcgacggaagccattgactcccgtgcccggcgagccgattgccgcgcgaatccctgaaaaccgcagtgcgatgccttgcagcaggttcaggtccagcggtttcgccgcatggctccagacccacagggtcgcggggccggcgaatacgatcaacggcgccgccgtgcccgtgagttgcgccagggtacgcgccacatcctccagaaggcggatctcggcgtccgggctttcgcaccagaccaggccggcgtagtgcttctggaaaaggctgtagcccagccgcctgccgaattgctccgtatccacatccctgccctcgagcagccgactgaccaggcttcgtttgtcgatcgggtcgtcatgggcctgggcgctcttttcttcgaggatgatctgggtcaccacacgcatgttgctgtcgatgaactccgagatggaccgcgacgagacctccaggaattcctcaagcaccctgggatcctgcgtcaggttgaaggccatcttcatccatagctcccaggcggtgttctgtgtcgacctcgcgacattcatcagcagctcggacagccctctgcgggcgagttccctggccgtgtccaccatgtcggccgagacgtagggttgcaccggttctccggggcgctgcagattggcgttcgcccaatgcagcaactctgcgcggttggcgcgccggcacgccgcgaggatgaccgggtcctccagcagcttggcatcttccggtgaagagaacagcgcctgattgaggcgctcgacccactccggcggcagcgtctgagcgagctcggcgcctttgcgcatgagttcacgaacggcttccgatgggcgtggccaggaggatggcgtactggtcatgggcggtgcaaatcaatcaaaaatcaaagaggaaatggtgcagttcgtaccttggcgcaaggttgggggaaacctagcatgaactcactgcctgaacaaaaaatacaaggaggcgccgtgacgctccatgttctttttttggggtttagcgcagtggcaagcgggcttgttcgccggtgcccgttgcccgggcagcgacccgcctgcgccaaccgttccttcaatccggagttctttcaatgtcagcctctcgcgataccttcagcctgcccgtcgtaacccgctcgactccagcgcaagagattgcactgctgagcgaccaggcaggtgcggtgatcatccgcaacttcatgacccccgaacaagtcgcacggatcaacaacgaactggacgctcccctggccgcgctcgaggccggctccaagcaccagcacgagctgatcgccgagttccatggccgccagaccaaacggctcaccaacctcgtcacccacagcaagacctttcgcgaggagatcctcgatgacgacctctttcacgacctggggaacgtgctctacgccgcggagtgcggtgactggtggctgaccacggcccagttgatcgagatcggcccaggcaacaaagcgcaaatgctgcaccgcgacatggcgcagtaccaaccgttcgtggccatgaataaacatgcgccgcgcaccatcaccaacctgatgctggcgctgaccgatttcaccgaggaaaacggtgccacgcgcttgatccccgggagccaggactgggatgacttcgacgatgtaggaaccccagaaatgacgatccctgccctgttgaaagcaggagatgccgtgctgttcggcgggaaagtcgttcatggcggcggggccaacgtgaccgctgacttctaccgtcgcgggctgaccatcccgatgcaggcttcgatcatcacgcctgaagaggcctacccgttgatcgtgccgctcgaactggtcagaacgcttgctccgcgcgttcagaagatcctcggcttccgctcccagtaccccaatggcagcccaggcctgtggcaacataactacgcagacctggccgactatctccagctctagaagccttccacgctggccggcctggccccgaaggcgccaggcccaaccgcgtccccggacaagcaaagaggccggtgaacactttcattcctggcggggcattactccgcgacgtgaaaacagcagcggcgtgccgtcggcgttgaacagcgccgccgtcagcgaaaggccgtcagccgacggtgcttcctggaaactgtttccaccatccctgctccgtaccttcagtccgtcaagcccgaccgccagtacccgagcgccagccactgctatggatgtgaccgagcccttgccttgcgttggcactctgcgaaaagccttgccatcggcagagccctgcaacagggtgccacgctgaccacccagcagcagacgcccatcggccagcaccgcgccagaccacagggtgccctcatagccggtatccaggtaacgccagttcttcccctggtcgtcggagcgcagcacctgcccatgctcggccgtggcgtacagggtgccgtggttgtcggcaaacagccccatcaggttgaggtcgacccgcttggctcctggaggcgcttgcaacggctgctccgtccatgtcttgccgccatcctcggtggtcagcaccaacgaccagagccctaccgcaacgccctgccgggcatcgaaaaaatgcacggcgaacagcggccggtcttcttcgctcgacaggcgctggacctgccaggattccccgccgtcggcggtggacaggatcgccccccagtgacccaccgcccagccgtgcctggcatccacgaaggacacacccgtcaatggcgtggatagtgggaccgagcgtgcctggcgccactgcctgccctggtcgtcggacaacaacacgacaccgtggtcgcccacggcaaccacccgctctccggcccagccggcggccagcatggtggcctgcgtggcattgcccgcctgcacggccggcacggtctgcaacggcgcggcctggagagacatcagcggcaatcctgctgcgagcaaggccgcggtgaatgaaaccctgaacttcatgcttctctggggtcatgccgagataaaggaaaattaggacatagtggttctatcctattgatataaatagaatttcacttggcctgtttgtcccgcctgcctcatgcccggaagcgtctatgctgatctatttgcatgcataggggctgagcgatggcggctttggagagaacggcatatccacgactagcaactaccctcagtgcgaaggacttacaccgcaactattcgctttcctcaggagagcttgactggatttccaggacagctcgtagcccagccctttcccttgggctggcagtccagctcaaggtattccaagagctccattactttcctcccctagacgagatacctccagaaatcactgaccacatcaggaatacactcggttttggccctcgtatcacttcccgctataccaactcgcgtactttttataggcatcaggcggccattcgtgagtacctccagatcaaggctttctatggtagtgaagcgctcaccatagctctccaccttgcgcacgaatctgccgaggtactcgaccagcgggcggatatcatcaatgtgctgatcggcgagttgctgcagcgcagctacgaactcccagcctattccaccctcaatgacgctgctgaggatgccttagttgcaatgcaggagcggctattcaatctcgttgtgaccagggcgccaattgaggtggtctacaaactgaaagaactgctcgaaacggatttcgggcgacgccaaagtgacttcaacgccctcaagcaggcacccaagaagccatcccgcaaacacttggaagtgctgatagatcacatggcttggctcgagagctttgggaatctagatgccatttttgatggaatcgtcgataccaaaatccgccacttcgctgcccaagctgcggcgtcggacgtcgccgagcttaaggactgttcgctgccgaagcgttacacgctgatgcttgccttgatctatcggatgcgcgtgcggactcgggatcacctagccgagatgttcatccggcgaatctctacgattcacaaacgtgccaaggaagaactagagcaaatccaagcacggcaacgtcagaagctggagcagctggcggccaccctggacggtgtggtgcagattttggttcaggaaccggatgaccaagaggcaggtagcctgattcgggaatacctctcccccgacggcaacctggaacggttacgcgaaacctgtgccgaagtccaggctaccggcggtaataactacctgccgttgatctggaagcatttcaggtcccatcgctcgctgttgttccgtctcagccaccttctccaactggagcccacgactcaggatcggtcgctggttcaggcacttcaactgatacaggacagcgagaatttgcaccgcgtgtggatcgacgagcacgtcgacttgtcgtttgcgtcggagcgctgggtcaaggtcgttcgtcgtcctgccagtgaggggccaccgaccaaccggcgctatctggaagtttgcgtattctcctacctggccaacgaactgcgatccggtgacatgtgcgtacaagggtcggaatccttcgccgactatcgcaagcagttgctaccctgggacgaatgtctccagcgactaccagcctactgcgaaaagatggaactgcctggcacggcgaaggaatttgttacctccctcaagacccagttggaggaaaccgcgcagcaactggatgacaaattcccctcttgccgaggggacgtatcgatcaacgaagccggcgaaccggtattgcgccgagtgacggcgcgcgacatcccgccatcggccatctcgctacagacggccctcatgcaacgcatgccggccaggcacgtactcgacatcatggccaacatcgagcactggattcagttcactcgacatttcgggccgatgtccggcaacgagccaaagctcaaagaacctgccgagcgctacctgatgacgatcttcgccatgggttgcaacctcggccccagccaggccgcgcggcatctggccggtaatgtcaccccccacatgctttcctataccaatcgccgtcacctctcgctggagaaactggacaaggctaaccgcgagctggtggagctctacctgcagctcgatctgcccaaactctggggcgatggcaaggcggtggctgcggacggcacccagttcgacttctatgacgacaacctgctggccggctaccacttccgctaccgcaagatgggagccgttgcctatcggcatgtggccaacaactacatcgctgtattccagcacttcatccccccgggcatctgggaggcaatttatgtaatcgaggggctgctcaaggccgatctcagcgtcgaagctgatacggtgtattccgatacccagggccagtcggccacggtgttcgccttcactcatctgcttggtatcaacctgatgccacgcatccgcaattggcgcgacctggtgatgtgccggccggatcgcggcgctgcgtataagcatatcaaccgcctgttcaccgacaccgccgactggcacctgattgaaacccattggcaggatttgatgcaggtcgcgctatcgatccaggcgggcaaaatctcctcgcctatgttgctgcgaaaactcggttcctacagccggcgtaacaagctctaccacgcggcacaggcactgggcagcgtgatccgtacgatcttcctgctcacctggatcggcagtcgcgagttgcgccaggaggttaccgcgaacaccaacaagatcgagtcctacaacggattctccaagtggttgtccttcggtggcgacgtgatcgccgagaacgatccggacgagcaacagaagcgactgcgctacaacgacatggtggcctcgtcggtgatcctgcagaacactgtggacatgatgcggatcctgcagaaattggcccgcgagggctggcagttcaccgatgaagatgtgtccttcctcagcccctacttgaccagcaacgtcaagcgtttcggcgagttcaacctcaagctcaaccggccgccggagccctggatcaaagactcggtgttccagcaggcagccgggtccatccgcactggcaagctcggtactgcggaaaccgaggagatgacctgatgaacattcctcctgcgtcatttcgcgtcacgccctacggcgaggtagatgccgaggcgctggagcgtttgcatgacgactacgacaccatccagttgctgcgtctagtcgatgggctggatctgctgctgaaggaaatgaacaacatcggcggcctcagggatggcctcctgcgggtacatgccatggcgaaaacggtgctcgatggtgcggcactatcggtgtctgtgacggaaggcggcagtatctgggaggaagccgagtcgcttgatgaggatctggtggaactgggcaattggctggccagtgtcagagttcaactgaaacccttgatcgaactcatgccggtcgatcctcattaaccagctagtcgccagcgacaccgagcaagctactgacttctgaacggctcgacaatctgacccacatagcctgtcggatagtcccggtcacgcagtcctacttcggcgctgctgggcttgcttgcgctgtcatagaaggttccaagcagttgatcccacaccagcaagaactcaccaaaattgacctgcgcatcctcgaagtcgcgtttgtgatgccagcggtgtgtttctgcaacgccgatgacgcgccgtagccagcccaacgagtagtccagatttgagtgctggaaggccaaatgtaccgtcaggatgccgaaccaggtggccacgagtgcagaaggagtgcccatcgcaaagagcacgagcagcccaggccctgccatgatggcggcatgcaacgggtgccggcgctcgccgttcatccagtagagccgctcagcgctatgatgtggctcatgcaagcgccacagccatggaacctgatggctgaagcggtgcatggcgtacaagctaaggtccagcacggcggcgacaatgactagctgagctcacagcggtaactctgttgggaagacacggaactctgcgggcacccaatcgcccagccgggccagcacggtcgccgtaatctggatcacggacaggttcacgaccatatggatgatatcagtaagggtatcctggtggtcctccaaccagtcgtcacggaacggctgcacgcgttccagcagcgccaccagcagaatccctagggcggcaatgatcggcgtgctgggccaatacggaatacccgtgtagagcaaccagatcatccaagctgcggccccgccaaagattgttgggtagctgagccagcggatcatgaacctgagtgaattgcccatcgtgaagccctccctgagatgactccactttgtgccaatcacctgtgatggcgcttgaacagaaaagctgaattcagcctttcagactgacatgacccaaggcagatgaggggtcgaggccaaacaggtcgcggaaggtgcgggaaaagtgggcagcgtcagcgaagccggcagcgtgggcggccgcagtcaggttggcgccgctggcgatatgctggagcgctatgaccaggcgattccatttccggtagctgcgcagcggcagaccggtctgttcgacgaaccaatgtgagaatcgggtaggcgacagatgaacgcgcttggccaacgcctgcctgccattaatcggctcttttaacgcagcgaggaccgactgcagtcgcggatcggaggccggcggagtcgtaaggttgagaacaaggcgcaccatttcccgaatttgctgggctgacggatcggagctgctcagcaattttcgcagcgatgctgtatcgcccatctgaatcggagtgatgccctccccgatgttatcgggaagtgctcgcgcctcatcggacagcgcgtcgaggtagatcgacaacacttcgtcagcttcgatctgatgggccacccctgccctgatgcagatggcccttgccgtcaccgacgaggatgtacacttcacagtcaagctgccgttcaagctgacggtaatttgatgcgccatgtggctatgccaatcttggctacccgcctgccccagaaaaatgcccagcccgggtgaaatccaggctctgccatgccagccgataccctgcgttgcgttcattcagcggcacctcagggttccacatcccgctgcattttgtgcactaatgagctttatagctaattgtggagtgattatagaatcctctttggcctgaactctatcgcttgctcgattgaaatctcacccgctacaaaatcagctcgccctgtgagactagacactctatttgatccaaatcaacgaagtgctgttatcgtcaaaaggagcattcatggctcgggggcaatctgctatcgtcggcctattgccccgactggtgaattgctgtgcgtcggattggattgatcctgctaatgattgctagcctcgtgctgccgaccttcggcggtgtggctttcagcatgccggcacaaccttgcccgatgcagagcgccgatcatcagggccatgcaatggccgatgctccgtgctgcgagcaaatggacacgtctgatggggtggccaataagtccccctgcaaatccggccaggaatgcaagaccggaggacttctccagaccaccgtgatcaagagcatatcccctctcccctcacgccccgagatattgctgacccagtcggtgattaagcgagagcccgcaggactctggcgccctcctcgtttcgtctaatgccgtgatcatcccgcgccttacagtcaggcgcatcgtcgcgaccacgtttcgtagctgcgacctcgatcaatcgcattggaggcgaaagcatgtccgctttcctttttccacgccgtggctatctcggcgtgttggctgccgcattctgggcagctccctggcttgccgcgcaggcacagcccctaaccttcgaacgagcccaagctctggccgaacagagtgcccctgagaacctcgcgcgccaggcgcaggtggcatcggcacagcaggctgtagggcccgcagacgccttgcccgatcccaagctgattataggcatcgacaacctgccgatcgaaggccctgaccgttacacacttaatcgtgactccatgaccatgcgccgcattggactcatgcaggaggtaccaaacggcgacaagcgtctggcccgtcgccaactggccgaagcctccatgacgcgggccgaggccgagcagcgtgccatgcagttggaaatcaagcgccagacggcagtgagctggctggacgtatactacgccgaacgcagtgttggcctcttcgatcaactggaccgtcagatcgagatgctccgctcgaccgtgcaatcgctgattgccggcggtagtgctcagcctggcgagctgttgcaggccgaccaggaagctttggcgttacaagatcggcgagatgaactgaatcgcgatgtggcagtagctcgtgccaagctgcgccgctggataggcaacgaggctgaccagcctttgcaaggagatgttcccaatctgaacctggtggcaccgcacctgcagcaacgcattgcctcacaccctgagttgcgcgctgcctccgcccgagtcggcgaggctagcgccgagctgaacgaggccatcgccgagaagacccccgactggggtgttgagtttgcctacaacaatcgcgacaaccagttcggcgatatggtgatggtgcaattcacgttcgacctgccgttgttcgtaggcacacgtcaggggcccaagatcaacgccagacaacaaagcgtgtcgcagatggaagccgagcaggaagcattactgcgcgcccatcaggctgagctggaaggcggtattgccgagcttgagcaactgcgcaggaccttgtcacgcaccgaaaaaaccttgatcccgcttgcaagcaaacgtgccgatctcgaactggccgcctaccaagccggtaacagccagctcacatccgttattactgcccagcgcgacctgattgatgcgcaactgcggcagattgaacagcagcgcaagttgagccagctctccgcaagcctgtactacgcctatgtggagggcctgaaatgaagatatcgacatttggttttgcggtcgccgtgctgaccgtgggcattggcgcggcgggcggtggctactggctggcccagcggcaagccaaacacgagctactgcctagctccgcaccgacggacgagcgcaaggtgctctattggtacgacccgatgcagcctgagcagcgcttcgataaaccgggcaagtcacctttcatggatatggagcttgtccctaaatacgcaggatccgagcaagatccgtctgtcctgagcgtccccgctcaagccgtgcagaacctcggaatgcgaacctcgacggtgatccgcggtgtactgccctcggatatcgaggtggtcggctccctggcctataaccagcgagaggtagcgaacctccaggcccgcgctggcggattcgtcgagcgggtttacgggcgtgcccctggcgatgtactgccagctggaacacccctggtcgacctgctgattcccgagtggtccgccgcgcagttggagttcctcgcggtactgcgtaccggtgacgcccgcttgatcactgcggcccaagagcgcctccgcctgctcggcatgccacaagcgttgatagagcaggttcgccgcagcggcaaaccgcgggcagtgcaaaccctcaccacacctatcagcggcgagctccaagccttgcaggtacgcgccgggatgaccgttgaagccgggcaggatctggcgttgatcaacgggctgtccagtgtctggctcgatgcggcgatacccgaggccatggccggaagtatccaggtcggggacgagatccgcgccaacctgacggcctttcctgatcgaccgctgctgggccgcgtcatagccttgctgccgagtgccgatccgcaaacgcgcacgctcacggtacgcagcgagctacccaaccctgccggtaagttgcgccccggcatgttcgccgccgtacgcctgaacagtgccgtcgaacaatccacgcttcttgtgccgagtgaagccgtgattcgcaccggcaagcgtgcattggtgatgctggccgaaggcgacggacgctaccgcccccaggaaatcaccttgggccgcgaggccgatgggcgtctggaggtgttgtccggtctcgaggaaggtcaggcggtcgttacctccggccagttcctcatcgattcggaagccagcctgcagggcatcctggccggcaatgcagaacaggacagcacggaggggctgcatgtgtctcacggtgtgattcgtgctctggacgcggagtcagtcaccctggagcacgggcccttcgagagcctgaatatgccaggtatgaccatggcttttccattggtcagctcagaagtagctgtgggacttaagccaggagatcacgtacgtatcggcgcccgccagaaaaactccggcctgatgatcgagcagctcagcaaggaaggagaccagccatgatcgcacgcctgatccactggtctatcggcaatcgctttctggtgctgctggcgaccctgttcatcaccgccctgggcatctggtcgctgcgcaacacgccgttggatgcactgccggacctatctgacacccaggtcatcatcagaaccagctttcccggacaggcaccgcagatcgtcgagaaccaggtgacctacccactggccacaaccatgctctcggtaccgggggcgaagacggtgcgcggctactcgttcttcggcgactccttcgtctacgtgctgttcgaggacgacaccgacctctactgggcgcgctcgcgggtgctggagtacctcaaccaggcgcaggaacgcctgcccgagggtgttaccaccacccttgggccggatgccaccggcgtgggctggatctaccagtacgccttggtcgaccgcagcggccagcatgatcttgcccagctgcgggcactgcaggactggttcctcaagtacgaactcaagagcctgcccaacgtagccgaagtggccaccctcggcggcatggtcaagcaataccaagtgctgctcgatccgcagaagctggtggcttatggggtaactcagcaggaggtcgaagcggcgctgaagagcgccaatcaggaaaccggcggcgccatcctggagctggcagagcgcgagtacatggtgcgggcttcaggctatctagagagcctggcggatttccgcaatgtgccgctgcgggcttcggccagcggagttccggtgctgctgggtcaggtggccaccattcagctggggccagagatgcgtcgtggcattgccgagctggatggccagggtgaagtggtaggcggcgtggtcatcttgcgctccggaaagaatgcccgcgatgccatcgccgcggtgaagaccaagctggacagcctgaagggcagcttgccggccggcgtcgaggtggtcaccacctatgaccgttcgcaattgatcgaccgcgccatcgataacctcagctacaagctgctggaagagttcgcggtggttgccctggtttgcctgatcttcctctggcacctgcgctcgtcgctggtcgcgatcatcaccctgcccctgggcatcctgatggccttcatcgtcatgcgctaccagggcgtcaatgccaacatcatgtcgctgggcgggatcgcaatcgccatcggcgccatggtcgatgccgccgtggtgatgatcgagaacgcgcacaagcacatcgaggcctggaaggctcgacaccccggtgaaccgcttcagggcgaggcgcactggcgggtgatcggcgaagctgcggccgaggtcgggccggcgctgttcttcagccttttgatcatcaccctgtctttcctcccggtcttcaccctggaggcccaggagggtcgcctgtttggcccgctggcattcaccaagacctatgccatggctgccgctgctggcctctcgatcaccttggtaccggtgctgatgggctactggattcgtgggcatatccccagcgaacaacagaaccccttgaatcgttggctgatcggtgcataccggccggtgctggagtgggtgctggcttggcctaaggtgaccctagcgctggccttgctagtgtttttgtccagtctctggcccctcagcagactcggaggagagtttctgccgccgatggacgagggcgacttgttgtacatgccatcagccctgcccggcttgccggccagcaaggccacccagctgctgcagcaaaccaaccggatgatcctcacggtgcccgaagtggcacgggtattcggcaaggccgggcgagcagagaccgccaccgatccagcaccgctggaaatgttcgagaccacggtgcagttcaaaccacgcgatcaatggcgcgcggggatgacacccgaaaagctgatcgaggaactggatcgcgcggtaaaagttccggggctgtccaatatctgggtgccgcccatccgcaaccgcatcgacatgctggcgacggggatcaagagccccattggggtgaaagtgtccggaacctccttggtcgacatcgagcgcataacgcgcgatatcgaggccgtggccaaagaggtgcctggggtgagttcggccttggcagaacgccttactggcggccgttacgtggacatccagatcgatcgactggccgcggcgcgctatggcctgagcatcgccgatgtgcaggcggtggtatcgggcgccatcggcggcagcaatattggtgagacggttgaaggactggcccgcttcccgatcaacctgcgctatcccaaggagtggcgagatagtccgcaggcactacggcgtatgccgatcctcacgcaagccggccagcagatcaccttgggcaccgtcgcccaggttagtctgaccgaagggccaccaatgctgcgcagcgagaacgggcgtctgtccggttgggtgtatgtcgatgtacgtgggcgcgacctggcatcgaccgtgcgcgagttgcagcaacgcgtcgccgagcgggtacaactcgacgccggcatgaccgtctcctactccggtcagttcgaattcctcgagcgcgccaatgcgcggctggcctgggtggtgccggcgactctgttgattatcttcgtgctgctctacctgactttcagccgcttcggcgaggccctgctgatcatggccaccctgccctttgccctgtcgggcggcatctggctgctctactggttcggcttcaacctgtcggtggccaccggcgtgggcttcatcgccctggccggcgtctcggccgagttcggggtgatcatgctgctgtacctgaagaacgcctggcatgcgcgtgtggataccgggcgcagcggtgatccggccctactggaggcaattcgtgaaggcgcggtgctgcgtgtgcggcccaaggtgatgacggtggccgtgatcatcgccggcctgttgccaatcctctggggcggaggtgccggatctgaggtgatgaagcgcatcgccgcgcccatggtcggcggcatgattaccgcgccgctgatgtccatgttggttttgccggccgcgtactggctgatgcgaaggcagcgtacacagaaggttcgcgcaccgcaggagctatagctttacaaacccgggcaagccacgcgccaagctgactcgcccgggtaacgcggcaggaagcattacggcgatgtaactttgacttcatttttatgacaggttgagcggatatattttaatcaccaccttgaaggagtgattaaacatgaaaagcctcaaagttattgcagcccttgccgctatggttgtttcggggtcatgccgagataaggggaaaattcattcatttggaatgtaagccattgctctgaaaggctttctatccggcaagcgctggcttgcaactcatggtctatcttttccgtctggttcaaggaaaggagtgacacatggcatccctcgaacgtaccgcctaccctgtattgtcgcgctcctattcgagggccgagcttcagcgtgaattcagcttctccgaggaagaagtcacgtgggtcaaaagtcgctctaatgcagcattccgactgaatctcgctgttctgttcaagacttttcaggtactccgatactttccagaaatcgctgaagtgccggagccagttgtcgatttcatccgcacacaaataggtctacgcagcaaggttgcgctatcaccctacaagtggatgcagctttaccgccatatgagtgccgttcgggaaaaacttggggttcgaccgttctacggctcggatggtcaagacatagcatccacgcatgcacagttgatggctcccctcctcgaacagcgcgctgacattattaatgcgatcattgacgagttgctgcgccaaaactacgagctgcccgcctattcgaccttgaatgacctagcagaagccgctcgtgcagaagcacaagagaaaatcttcaaccttgtggtagccagagctccaatcaaggtgatctataagctaagggatcttctcgacacggacttcgggcgtcggcagagtgacttcaacacactcaaacaggcacccaagaaaccctcgcgcaagcatctggaggtactgatcgaccacctagcctggctagagagtttcgggaaactggatgccatttttgatgggatcgtcgatacgaaaattcgccactttgctgcccaagctgcggcgtcggatgtatctgaactgaaggactgctcgctgccgaagcgttacacgctgatgcttgctttgatctaccgtatgcgggtgcgaacccgagatcacctggccgagatgttcatccgaagaatctccacgatccacaaacgcgccaaggaggagctggagcaaatccaggcacgtcaacgtcagaagttggaacaactggcggccaccctggacggcgtggtgcagattctggttcaagagccggatgaccaggaggctggtagcctgattcgagaatacctctcccccgatggcaacatggatcggttgcgagaggtttgtgctgaagttcaggccacaggaggtaataactacttgccgctgatctggaggcacttcaagtcccatcgttcactgctgtttcgcctcagccaccttctccagttggagcccaccacccaggatcgctcacttatccaggcgcttcagctcattcaggacagtgagaatctgcaccgtgaatggatcgatgagcatgtcgacttgtcgtttgcatcagatcgctgggtgaagatcgtgcgtcgccctaccagtgaagggccgcctaccaaccgacgttatctggaggtctgcgtgttctcctacctggccagtgaactgcgctcgggtgatctgtgcgtgcagggatcggaatccttcgccgactaccgtaaacagttgctgccttgggaagagtgtctccagcggctaccggcatactgcgagaaggtgggccttcctaccacagcgaaggagtttgtcgcctcgctcaagagccagttggaggaaaccgcgcaacagttagatgacaagttcccttcctgtcgaggggatgtgtcgatcaacgatgcaggcgagccggtactgcggcgggtgatggcgcgggacatcccgccttcagccatctcgctacagacggcgcttatgcagcgtatgccagccaggcacgtgctggacattatggccaacattgagcactggattcagttcacgcggcatttcggaccgatgtccggcaacgagccaaagctcaaagagccggccgagcgctacctgatgacgatcttcgccatgggctgcaatctcggtcccagccaggccgcgcggcatctggccggtaatgtcacaccgcatatgctgtcctataccaatcgccgccacctctcgctggagaaactggacaaggctaatcgcgagttggtggagctctatctgcaacttgacctgcccaagctttggggcgatggcaaagcagtggccgcagacggtacccagttcgacttctatgacgacaacctactggccggctaccacttccgctatcgcaagatgggggccgtggcgtaccgacacgtggccaacaactacattgcagtgttccagcacttcatcccgccaggcatctgggaggcgatctatgtgatagagggactgctcaaagtcagccttagcgtcgagcccgatacggtctactccgacacccagggccagtcggccacagtattcgccttcactcatctcctgggtatcaatctgatgccgcgtatccgcaactggcgcgacctagtgatgtgccgaccggatcgaggcgtatcgtacaagcacataaaccgactgttcaccgacactgccgactggcacctgatcgaaactcaccggcaggatctgatgcagattgcgctgtcgatccaggccggcaagatttcctcgcccatgctgctacgtaaacttggctcttacagccggcgcaacaagctctacctcgcagcacagacgctgggcagtgttatccgcacgattttcctgctcaattggattggcagccgagagctgcgccaggaggtcactgcgaacaccaacaagatcgagtcctacaacggcttctccaagtggctctctttcggcggcgatgtaattgccgaaaacgatccggacgagcagcagaaacgtctgcgttacaacgacatggtggcttcgtcggtgattctgcagaacaccgtggacatgatgcgcatcttgcagaaactagcccgcgaagggtggcagtttaccgatgaggacgtgtcctttcttagcccctacctgaccagtaacgtcaagcgtttcggcgagttcaaccttaagctcaaccgaccgccggagccctggatcaaggattcggtattccaacaggctgccggctcgttgcgagtcaactcgaccagtaaggccgcggccgaggaggcaatatgatcgagattgcgtcagcgtcttttcgagtcacaccctacggtgaggtggacatcgcagcactggacagaatgcgagccggattcgatacatcccaacttctacggctagttgaaggtctggatgcatgcctctcggaaatgggtggtatcaccgccttgcgtgacgaactgctgaaattgcacgcaatggcactgactatcgtcgaggggactgccccggctgcacccaccgagaacgcgtgtatctgggctgaagcagaatctgtgcagttgggcctagaagcgctggcgacgtggattcgctccgctcagggcttcctaactcccttgaccagtcttgagcctgagcatcagcagtagctcgttaaaccgtatcaagccgagccggaatcagcccggcttgatcagtgacctagcgattcggtagccgctgagcgatcacgacaaagaaacgccggcattgcccgaacgtcgaccagttcagcagccaatttgacaaggggctgcgtaatcataggtaccactcaaaatgtatatctttacttgagactatgactcatcataacgaatcgctcgcgaaattcgaaacctgacttcttataaaagcttactgctttaggattattttcgtccacttctagatgaactattgcggcaccttgagacttcaagaaggacttgaccttttctagaatctcactgccaaatccctgtcctcggcactgttcatcgatataaaattcatcaatccagacctcaatccccctgaactcgatactgtagcaattgcaagtagcaatatatccaatctgcttgctgccaagacaaataatccaaacgttgcccttttctgaagatgacaagagagggcgaagtgcagccagcctgtcttcgtcagtcatctcaataccatcgtataggtggtattttttcattagctccacgagtaagagctcatcatctattgaggctgagatcaacttgatatttgaatttttgctcatggcatcttcagatcttggtcatcattattacgccggcaacgattacgactatggcgctcatgcgcttatatgcgtccgacgagctaaagttttcgctgagtatctttgggttaactattgctagccaatgacttaaggctagcacatataccgggtgaagactgaccaaaaccgagaccaccgcaacgtttccaccagcagataatgcgccaataaaaagcgcgtatccaccggcgtcgaagagattgctcagcgcatacaccgcccagccctttggtggcatttcggagacatcctttgcgatggaatggcgccatttcggaaccagcagcatcagagtcccgccaagaccgtagcctgcatagttaaacataagaaccgagggcaggctgtgactcaggagcaggtgatcgtatagtagcgtagccaccgccccaaaaactgctgaacctattagaagcaatactgctgataaacttatcgagcctggtctccctttgccgattgccacagcaaagtaaaccccgacaaaaaccaaggcaatgccgagcagctcaatccctgttggcgaataaccaagcaagaggatcgatacgacaagcaccagcaaaggagttaactgatgaagcgcaatcgcagtagagatatcgaccgacttcagcggcattgcgtataggaaatacattccaaaaatgcataatcctgacagcaggttcagaagcgctgaggttgtgtcaaagtcagatggtgtaaagagaagaaaaatcagcgcagaataaagaagatttccaatgctcaggagaaatataaatgtagtccagtgattcgcatgatggatcactgccagcttgtccaggatatttgaaaggctccacagcagtggagccataagtgccataactaaccaggtcattttcctcgaagtacctctaatatggtatcgcgactatccttcaataaaacatgagaaaagtcgtcggtgtcatggtcaaatataaaggttcgctgatagtcgaagctctctgaagtttcgaattccacaatcttgtctagaatcgcctcaacctcatcaaagcgatgagagtgattaaggcgaagaattttcattgcattaccgtaatgggctgcctcatcacgggcagcatatctaatccaggttgaaagagactcgttttcaaacgagtcaaagaagcttacatcttgcttgtaggctcttgtgctggtcacttcatcaaatgcgatagagagaagaattgtgaattcatccttcatgaagtcttcgatatgagaaaagtccggagagttcgatctaatctcgcgatcaatcatgtcttccggcatggagtaaagtacgctattaatctttctcagtccgcgataatgattttgctcatcgagatgccacaggcatacgaactcgataaattcattgctaaattgaatgtcgcgacggccaaacaagtagcgcaagaagtttattgaatcaaattcagagctcatgtcatgccaaaagaaaggccgacgctcctcgagctttgagggattcgactttatctgttcaattgacaaacccttcagcaactccagggatgaccattcgtagcttttaagaccaatacccgacttaacatttgacacttgaacgctccttgttcagaggacaaaatttgagaacagccagggagagtcgctatctatggccgaaaaggtgcctgggttgtttttggtaggattccagtccgaataaaccccttttagttcgcctagatactgtgaaatataagatagtgccacttcatgatccatgtcttcggcttcaattattcctgccgacggatggctcaggatccataagtaaccggaaagaactccggctgctacctgtaacgttgttgcagtgttgagagtggcaagttccttggccttttcgatgcttaagatagatccataccaataactagatttttcgtgccccataagaagaacaccgaggtaatcagaacccgacaagatatcaccaggacgaagtacttttgtcttttctggagtcatgcaatcattgccgaaccattcatgtacagagagaattgcttcatcgcttgggcgataggcataatggacagttggtctatatgtctcatcggcagttctgagcgtcaaaaagtcagcaattgaaattgcctcgtgatgagttaccaaataacctaagctagggccgttaaatggcgtccatgtcttaactctaacagaggcccctggcttctcaatatagattgctgctccgcatccatctgtatgcattgacgcatccgtgggtagacttcgctcgtgacttccccagcccaactctgccggttgttgcgactcacttatgaacccatgcactgaccaagtatttacgaactcacccctctccctagatttctgagaaatttgcgagtcgtactctgcgacatggattactttgacacccaatctttggcttaggatagcccactgctctttattagagggctttttacaatcacccaatatctcttccgctaaatctaaaagagcacgtttaacgaagtgggataccaacccaggattcgcgccatgcgccacgagagccgtcacccctgagcctagcctctttttcagagacagcatttgttctcttaagtgatagttagttcgcttatgcagtggtatggttgggtcatcatatccgcccttccacggctcaatgcatgtgtctaaataaagagcccctgcggagcggcataattctatcagggcaagacttgagacatcggttgatagatttattagaaccgtcccttcaccaagaatcggcacaagaatgtcgcgatagttgatttgatcaattgcagagttgataaattttaagccaaaactgttagcaaagtactcaataagcggtggtgtttttggatcgatcgcgtagatttctaaagtagataagtcgtgaaccttagaaaggagaggaaggaaggactgggcaatcgttcctagtcccacaaagacaattcgctgggggggattaattgaaaaatccattcaagcatccttactgtctattatgaaaatctgtttccctatgcctgcatgtctactttgaacttggctggcatgtcaaattatttttctggatcgcctatattttctttttaaatcaaatacttaatcgatagttaacttcggggagggaggtgccaactgggcaggttttagtcagctccgtggcaagtgacaatgattttcacttgcacatcacgcactatgcagtttttgggcttgcccgcttgaaactcccttcttatcgccgcactcgttggagcttgcaatcaagactggcagccaggcccagagaaggggccaggccttaaccgcagtggagcgcttgaccagcgtttcggtcgacaaggccaggatcagatctaacactgttggcggcagcggtgttgatggtcatgtgtccctggacgtcttcttctgttggggaaagaagaaaaacgtcttctgcggcggcgcgatcaggatatcggtggacttgatgctcgtgcctttgcgccgcctgctcttgccttccttgtccactgcctggatatcgccgttggccaccgcgacatccagggccagcttcacgcgactttcgtctgccatggtgaagttggtgagctccgtcatgagctggatgaagggacgacgctcgacttcgaatacctgtttgggtagcagctcggacagttccccacgaatccgggtatcagtcacttggtcgaactggtgttctccttcgcagagtaggtccggctggccggtcacccccacatcccggttagcgtcgtaaccaaagaagcaggacggtgataacaggtgggagaaattgttgccgtacttccagtgtatggctttcatcacgtcgttggcgcggtagctgttcgccaggtggatgaaccagtaggccatggggttggtgccgtgtgggcgaatgaagaacaccgtcatgaactgcgcgccgctttcctgcttgatcccgtccgacagatagcgctggatcaggtactgccaatcctgggagctatgtgcttttaagtgccgtagctgttcccaggggacatactgttctagaccgatactggcaatagccttgcggttggcgtggcggtccgctaagtacgtgattagaaagtcgacattgaaggtcagcaggacctcagcattgctgaggtgctggaagatccatttgatctggccgaatggcacgtcgccgtagccgtactgatcgagcagaaacagaacgcgctcgctttttccaaaggccttgaggctttgcgcaatggccggaagagctttggtgaactcggcggtatgcaggtgaatgtcctgtccaatgcgggcctgatgtccgcggctggccaggacggcgtgcaagcaagcagtattcttcggcttcacatccacaaagtgatgctgcgagcagatcggtcgatgcttgatgcgccccacgttgttgcgcacttccgactcctggattgcttccagggcgatcaccggggggccgaagtggtgaccgcctgcgctgtcgttatatatacctccaccgctgaagccatcgacaattgataggccaagcagtggcatttgctgattccgcatcaggacatcgatgtaggcctggatgtagtcgtcgatgatctggtgcttgatcttgctgtgtggatcgatggtgggaaaggtttgggttgcccagtcccagcggtacttctcgtcatccttggccatcgggtcgtccttgttttggtatcaggcgagggtcagcagcggaatttcatcccaggtctggcccttcagcagccggccattagctttctttgaacgcttcacgccatcggagccccagccgccccattgtttgaaaaagaaagcagcgccaaaggcatcgcactggcggtggatgttatccacccactcctgcttcattggccgggccttggcgccggactcgccgccgacgatgacccaatggatgtcagtcaggttcagttcacccaagtcttctagtaagggttccgcggagaggaaacggatcgcggcgttgatgccacgcaggcagtcgattctgggcacgccgtactcccggtcctcgaccgagacccccagccaagcgttggccggcggtgtgcgctggctgaaatagtcggccaggcgctcggcccgcttagtgaggatctggaaggtgtgctgtgaggcctggtggataaccgcgaacacctggtcgatgtaggtgtccggcacctgctcatggaacaggtcagacatggaattgacaaagtagatggtcggcttcttgcgctgcagaggctcctgcagtttctctgggcgcaggctgaggcgaaagccgttctcgtagccgggcgtgcccatggcctgcaagcgacgcgccatgttctcggcatagcagtgtttgcagcccggcgacaccttggtgcaacccaccaccgggttccaggtcatttccgtccattcgatgctggtctgcgtactcattgcaccgtcactcctgtcgtgcgtcgatgttagtgagaagctggcacttgagtcaaagtgctggcatttagttcgagagcaggcctcgcagcgaggccgccaaaggagatggcagggtcgatgtagcgcatcgccgatttgatgtccttccaccccacgtaggtcattaacgccttaatgtcccagccattggccgtggcccaggtggcgaagcctcgacgcaatgagtggctggtataaaggtcagcctggatccccgcacgctggagtatctgccgcagtaggacgatcagactgccaggattcaagccagcctcgttcaagttgccccaacggtccagccgacgaaaaaccatccctcgagcaatccctgctgcaccgatccagtcgagataggcctgtactgggcacagccgcctcagcgcaggtacgtagtgagtggtgccaaggttgtcccggtcacccttgctccaaggcaaaaacagcgtcatgccagcaccggcttcggcttgaatgtgctccacctgcaagcggcacagttcatcgctacgaaagcctcgccagaagccgattagtagcaatgccgtatcccgccgacagcgcaaatatcccgccaggtcttcggcttgaaacagacacatagcctcctgctccaaccactcaaccgcatgctccagatgctgtaattgcagcggcgcggcctgctttgtctggctcgggtgcagggtgcgaattcccttcagtacctggtgtacggtcggggtcttggtgggatcggggaagccgtgcctgatatgccactgcgcgagggcggcgaggcgctgctttagcgtgttgaggctcagcgtgtcggcgtagtccaccaggtaacgcacgatggagtcactcgtggccggcaagaagccgccccaggtcacctcgaaatgttcgacggccgactggtagctacgccgggtgttttcccgcgtgccggcttgcaggtagcgctcgacgtccttcatcgcccgtgcgtgccctttgtgtactgggaaacgaccgcgaagcagccgtttttgccaatcatattgaataattcatgattacccaattctagattattggtagaaaataagggaaattcttgataaagtgctatgtatctacatggtatgtaccacagaacgaaatcgttaggaggctccgtcatggcccgtggtggaatcaacaaagctgtcgtgcagaaagccaggcatgccctcctcgcccgcggcgcccaccccagtattgatgcggtgcgcatcgagctgggcaacaccggttcaaagaccaccattcaccgctacctgaaagagctcgaagacgccgagcgcggccgggatgcggcttcgatcccgctcagcgaacagctggccaatctggtcagccaactggcagatcagctagaggaggaggcgcaggccgcggtggccctggagcgcgaacaactgacccgcgaacggctcgattaccagcatcggtttcgacaggccgaaagccgcatccaacaactggaaggccagaccgcgctcgacgcggaacggcttcagaccactcatcacgagttgcagcaggcacgcgagcaacggcaacaggccgagatcgagaacgcccgcctacagcaggctaatcgtgacctcgaggagcggcacaaggatcgcgacgcacagatccactcgctggaggaaaaacaccgacatgcgcgcgacaccctggagcactaccgacaggccagcaaggaacagcgtgagcaggaacaacgccgacacgagtcgcaggtacaacaactgcaactagaactgcggcaactgcagcagaccttgataatcaagcaggacgagctgacgcaactgaaccgcgacaatgcacgcttgctcaccgaggcgcggcagttgcaaaaagagcgacatgcacagcaacagctagtggcgcagaaaactcaggccctggaggctctgcagagcacgctggccggctccgaacgcacgaatgaagcccttgatcagcgttgtcgcacattgcaggaggaggtgtcccggctgagcgaagcctccgcgcttcaggcgcagcagacgcagggcctgcagaagcgcttggtcgaagccactacacagctgaagctactcggggcaccgcttgcgaacagcgatggcgcatgtagcacatgaaccggcacactgagcctatgcgctgagcggaggtgaagatgacactacttgagactaccaatgagggggctgcggaacctgtccgtttgactacgccactgggccaggccattggtaatctgttcgcccgggccttgccgctactggatggcaatccgccaggctcgctcaaagtcttcgtcttcggcggctgcgcggtgcacctgctcacccatgcgcgtggtagtgcggacatcgatgcggagatcgaggcggcccgcgtgctgcgtaaggacgagatcatggccgtctacacaccgccagagggttatgaggacggcgacggccgcgacttgcaggtgtacctggaccagaactacaccaatgccctcgggccactgcacgaggactaccgcgagcgcgccatcccgatggagggtttcgagggtgagcagccgctgcatatcttcgttgccgccggcgtggatctggccatctccaagctcggccgctttacggaaaacgatcaatatgatatcgaacagctcatcgaatgtggccgtgtcgatgtcggccagtttgttacactggcaacagaggcaatcgattatgccgtgggcaaccgaagcgcaatgctaggctgcctgaaactggtcatagcgaagtacctggaggatgggcgagatgccacgtctggatcgtaaacaaagctttggcacgctcctggagactgtcacccagcagcgtcttagccaagttgcgtccgatgctcttgtggagcttgccaagcagttgtggtacgaagagcgcgacctcgtgccagtactgcagcgtgaagtggcaagcaagctgcgcgagcctgaacagaagctgcgtgccctctatctcgtcgacctgctgcgtcgctttccctgtgtatcaacggacaaagccgcgcgcctaaaaggctttgtcagcagttggtcgaacctgaaaccagcagaacgctcacctcgtgcgacccagcttgtctctcgctaccaactcgacaagctggcctatgaatgggggcttgaagaggacgtcagcaagcagatgcaggatgtcctggctttccaaacccgccattacgccgccacccagggcgtgaagacgggctattcagagccaacgcccgtaagctagcagcagggcacggcaaaatggacgcggaatggccaactcaacaaatgacgaccaacgactcgctgatctaacacgcgaggcattagccgacgtgagcgagggtttggtgatcgatcacgcattggtcgagacctgggctcagagccttgataccgacaccccggtgcctttgccaactccagatcggcctacttaattcgcagcaggccgaactgatcctcagcggtatcaggctgaagccattgcgctaaggaatctccgaacaagccttcagttatgcgagaatccccgcaacacctgatccgagccgcccatgagccagatgagcttttccgactttgagtacgccggcaagcgcaagcaaacccgccgagagcgcttcctcgccgaaatggatcaggtggtgccctgggcaggcctgctggagctgatcgaaccgttctaccccaaggccggcggcggtagaaaaccctatcctctggaaaccatgctgcgcatccatctgttgcagaactggttctccctgagcgacccggccatggaggaagcgctctacgaaatcacgcccatgcgccagttcgcacgcctgacgctgagcgcgccaatccccgaagacaccacgatcatgaacttccggcacttgctggagaagcatcagctcgcaccggcaatccttgcggtcatcaatggttatctgcaggaaaaaggcctgtcgctgcgccaaggcaccatcgtcgatgccaccattattcatgcccccagctcgaccaaaaataaagaaggcaagcgtgatcccgagatgcaccagaccaagaaaggcggtcagtatttcttcgggatgaaggcgcacatcggtgccgatgtcgagtccggcctggtgcatcacgtccatggcaccgctgccaatgtggccgatgtcacgcaggtggctgaactgctgcatggcgaagaaaacgccgtgtatgcagatgccggttacaccggtgtcgaaaggcgcgaagagcatgaaaatcggggggtgatctggcagattgcagcgcgtcgcagcacctattccaagctgaaccagcgcagcgtactgtacaaagccaagcgcaagatcgagttctgcaaggctcagacacgggccaaggtcgagcatccgtttcgcgtgatcaagcggcagtttggttacgtgaaaatacgttttcgtgggctgatgaaaaacacggctcagttgaccacgctgttcgccctggcaaacctgtggagggttcgaaaacagctcatgggtatgggtgaggttcgcgtttaacacggagaaccggtcgaaaaagctctccgtacatgatttttcggtcacttttcgtccaatgacgctgtaggtgcctggaaaattgcaacttgccgcggctgcacgacaagttgatcggagcatccctaagcgcgccttcgcttgagcaggacttccattctgttcgtttaaatacagcaagttacagaacgaatgcactaatttttgcctcatctcggcatacccctgattccccccttacctcggcataacttcaatcaggcgttcagagccgattctataattgactataaaatcctataaagcccatcctgagtaacttagcgacgctagaaagatatttaaatacaatcagttgcagcgcgtatgtcctaattttcctttatctcggcatgacccctctctcctcagtgcaccagcgcgccgatcatgcgcacgggacgtttgcgcgggaacgcccgctccagccatacggcgaaggccggcagcacggtcatggccatgaccatgttgacgacgaacatgaaggccagcagcttgcccatgtcggcctggaacttgagctccgagaaggcccaggtggccacgccaacggccagggtgatggcggtgaaaatggtggcgacgcccacctcgagcagcgcgtactccaccgccttggtgatcgtctggccatgggccaggtgcagttgcaggcggttgtagatgtagaaggcgtaatcgacgccaatgcccactgccagcaccatcactggcaaggtggcgatggtcaggccgatctgcagctccttcatgaaccagtagccaatgaaggtgccgatggtcagcggcaggcaacacaccaggactgcccgcaagtcgcgatagaccacgaacaccagcaaggcgatggcggcatagacgtaaagcagcatgggggtttcgctcttctccacctcttcgttgatcgctgccaggacgccggcgttgccggaggcgaggcgaatcgaaatgcctgacatcggatactcgctgcggaaggccttggcggcgtccaccactcggttgatggtcgtggccttgtgatcggcaaggtacaggtgcacggccgacatgctgcaatcggtgcgcatcagcccgggggttcgcgcaacctcggtggccagcgcggcgtagttcatcgggtcgatgggcaccgccgccatcttcgggttgccttcgttgtagccctcgttgaactgacgcatggtggtggaaaaggacgcgaccgagaggacgccgggcaccccctgcatggcccacacgaaacgatcctggtactggcccagggcaacatcctcgcaggccacctcggaaggagccttgtcgacttcgaacaccacgctgagccagtccaggccaatgtcgtagttgctggcgatggagaccgcgtcgcgattgaagcgcgagtcctcgcgcaactccggcgcacccgcctgcagcgtgccgacgacgcggtcatggctttgccagatcgccgccaggaacaccgccaaggctgcgccgagcacccactgcgccttgcgtggctcggcgagccgggccaggccccgcagccaacggctacgacgctgccgggaaacctcctgggcggctgcgtacttgtcgtcgacgcgcagcaacgacgccatcaacggcagcatcaccaggttggtgacgatcttgtaggccacgccaagcgaagccgtgatcgccagttcccgcaccatcgggatcgggatcaacagcagcgtcacgaaggaaaccagcgcggtcaccagcgccagcgtcccgggaaccagcaacccggtgaagctcgagcgtgccgcctcttcggcgctcttgccgatggcgatctcgcgcacgatgaagttgatttgctgcacgccatgggaaaccccgatggcgaacaccaggaagggcaccagcactgccagcggatcgagcccgtagcccaacaggcgcaggctgccgaactgccagaccagcgaggccagcgaacagaccaacgccagcaaggtgaaacgcagcgagtggcaataccagtacaccgcccccgccgtcagcagcaacgccagcaaacagaactccagcacggctgaagctccgtcggcgatgtcgccgatctgcttggcgaaaccaatgatctggatttcgaaatcgccgtcttcgaagcgctggcggatctctttctccagccgatggttgaaggttacgtagtccagatgggcgccctggctatcgtactcgttgagttccaccgtgatcatcgcgctgctctggtcccgggaaaccagcgtaccgatgaagccgccctgggcagtggaattggcgatcttcgcgatgatccggtcatccaggtgctcgggagaaaccgttccgggtaccagcggatcagcacgaaaaccttcctcggtgatttcgttgacgaaggcgttgggcgtccacagggagcgcacgctgctgcgcgatactcccgggaggaaggtcaccgcctgggtgacgtcatacagccgcttcaggcccggggcgctccagatatcgccctctcgggccttgaccacgatggtcagtcggttcgcccccagcaggtcattgcggtaggcctcgaatgtctcgatgtattcgtggcctaccggcaattgcttttcgaagccggcatccatgcgcagctgtacggcgaaccagcccatgatcagcgtgaataccgccaggctcgccagcaccagccggcgatgcctgaacaacacaccttcgacatatgacaacaggccacgtgtcggggcctcaggtagctttacagaaccgttcacggcaagcctcacaaggtgcgggagatcgcgatgccgacataatcgcggtcacgataaagctggtcgtagggcgtctcaccgcccatgaacttcgcgtagttgagggaaatctgccaactggccgggttccgcacgaagttcaggtacaggttcatgctgctcgcgtcctcggtgaaggttgcgctgaggttcggtgtccgtcctcccagcgaccgtgcatagaagacgcccggcgtgacctgccagcccggcaacaaggtgccgtcataggtcaggctgaagtccaggttgatccctgaagaggtcttgtcgccacgggacttcggcgctctggcaggatccagctgccaggcattgagtcccgcggcgagcggttcgccattgacctcgtcatgcagccccgggtacttgatgaccaccagttcggtcagcaagctgcccgtgctggccccgctgaaatccagaagcgtcggggaattggacggcgtgaagctgtacaagccggtcaggtgccactggaatttcttctcgtccttccagcatttgccgccgttgccggtacacaggtcgatgaccgggttgagcatgaccgagtccttcggccggtacgacagctccgtaccgacggcccagtcaccgatcggcatgttggcactgatgccgtacatcatccggtcttcctggtactcccaggtcggtgccgccgcgaaggtgttcgggtcgagaatggcgacacgcaacgatggcaacttgtcgtgataacgcatcacgtagaagccataggcgacgtcgctgtcctccggctgccagcgcagcgaaaggccccactggccgctgtcgcgggcgtccttttcggagaatccatagtcccccctgccctcacccagcgcgttggtggtggaccagtagctgcctaccggcggcaattcgctcttgttccagcggaattgatagtaggcctcgacgttgacacccgagcccaggcccgacgcgacactgagcatcggcgccggcagcacggcctccttgagctgcacgccggggcgcgccaaggcctggtaatcgtaggcgttggtattgttgatgccaccggccacgaacaggctttcgccccagttgatcacctggttgcccaggcgtgcgcggacccgctgcccgcccacgtcgaagcctttgctcacccacaggtccagcaggcgggccttgaacgcgaggtcgtcgcgagcgtcgtcgctcagcccgttgctgccgacgctctccggggtgttgaacgacagcgtgccggtggtatcggtggcagcgaagtcgcggatccaggtgccgcgcgccatgaaggtgatgtcctcgggcatcttcagcaacagctcatgggtgcccttgaggtagttggtgaacatgtcgccgcggtcgtagttcaggtcgccctggtcggccacgccggagctctgcgccaggcagccggagggcgcgttgtgcccggtcggtccctggttgatcaggttgcagccccgtgactcggtacgcagacccatgcctgcggtgatcgtggagtcgaaggagccattgagggtttcggtttcgaacgtgaatcccattgccagtggggttgtgcacgcgatgacaaggcctgaggctttcgtaattatttttttcatgctggctctcgatctggcgtcggttagcgctcgctgatggctcgcagattgtcggaggtgaagaagtcacgcttcaggcggggggagccattgtcttcggtgagccagcgaatatcgttcttgcccgcaccgatcgaggtcatgtcgaagaggtagcggccatccgccaggttgtactggacctgggcctggacgtcgcaggcgcctgtctcgtacacgggaatcgagaacccttcgcgcactttccagatctgcccttgcttgtcgtagtccaccgccagcaacgggttccagctgtcctcgtcgatgtagaacatgcgcttcggcgcctgatggcgcatgccttgacggacattggcctcgacgacccagacccgatgcagctcatagcgacgcgactgcggcgcgatcgagtcgttgccggcaaacgtctccaccttggcgccagtgtcgtaggcaccgaaatcgttgtaaggcaccagcaactcctgcttgccgatcagcttccagtcgaaacggtccatggtgccgaagaagacgttcgcctcgtcgacggtgtactggttatccaggccgatctgtggcgcatcgtaggagtacgacggcattcgccgcacgcggcgctggccggggaagtagtagaaggtcgtggcctgttcgccggccacggcagtctgtaccgcggactggccggccagagcagccggctcgaggtagttgaagaaggtcgcattctccaggcggccaactgacgagaagagcgcactcccctttttcccccagggcgtgaagaagaaggtatctgtcgactgacgtaaccattccccccctttgcgtggagaaattccggaaatggtccggggaatttcgacgccaacgccgcggtagcgcatcttcatgttccacatcacctcggcaccggtactcggcatggggaacgggatgcccggaacgtgagcctcgtccagagcgaggccggcagcatcgagcttggcgaaaccaacgttctgccgggtgttctcgaccacgaagtccggagcgctacaggtccgacgggtcggatacacatccatgcgatagccgggaatcctcttgaacagctcgacctgtccgggggacagcttgctcgagtgttgcgcgagattgttcgcgtcgatgctgtagagcggcttgtcgcccttgaacttccagtgctctcctcgcacctggccgtagctccatccctcgtcctgctgtccaggctgcgtccaggcaggaatgtccccgcttgcactcgctgcgatctccccgcccaagggggtcagtttcgaccccagcgcctcggggccctggggcgccgcctggaccgaacagagcacggtcgataccgcgagggtcatgaacaactgctgctggaaaacacgacgggtgggcgcttcaccttccagccgttcagttacatctttcattggatggctcctcacacagggcatggaccggttgctcgacctcccaaagggaagaagtcggctcctgtcgataatgatcatttgacctgatcaattgaccatgtcggacgatcatgaggcaaaccatatgccagttctctttcatgtttttttaattgttataaatcaggcggttatggaaaaagttctgttccaggcccagtgccctgtgcaccaccttgggaagtaaagaaacatgtgttacctggagatgcttggtaacagggcacaagagagcttgaggggaactttcgtagatatcggctcgggcatttttaattgtcgtttcgcctcgggtcagagggagcgatcggatatgaccggtcatgaatcgagcaactttatccgacaatgcacgctccgcggcggagcgggactatagcggatgtaatgcctgcaaaaaaaaaccgccccgaagggcggtaaaaggcagggccagggcctgccatggagttacagcagaacagttctgccaggttgtcggatcagaaagaaaaacttgtcgcgccgtattgtttagcgtggacgaggaaacgcttggccgtataccttgttcgaacgctccagcgcaccataggcatagtacaactgcaccatggaataggaccaagccaggaaggccatggtcatgaagaccatcttcgtgtcgtctcccggaatcgggaagaagtcatacctgagcgctactaccaggcccgccagcccgccagcgatggtggccagagtatggagggcttcgcctgcacgggccagttgcaaggtgaagtagcaaagatacaaggtataggctgaccacatgaatacatagaaataagggaggaatcccttgatgattccagacaggaaatagacgccggtagcggcaaagccagctacaaaaatgaggatgtccttggcgggcgacggtttgtaatcgtgggtaactgccattagcccgagcgtagcgataactggcactcccacccctcgcgaaaaggcgtcgagaaagatcgcgatgttgtagttggcttgccagccggtggctatgaatgtagtgaagttcgatgccgagatacctacgatcaagaactccagaccaagcaaatagtttttccgcctgatgaatgcagcgccataaaacaatccggaaatcaccaggagaatacatgagagcagagcgaacaagtctctcggttccacgttaactgccccttcagatagagttgtatcgatgccttgtgtctaatcggtgcaagggagtacgggcataaccccattaactccccgcatcgttatcagccgttcaaggctttgtctttgcgcactttcttgtcggtccatgcatccagtagcctggcggccgcaaaggccgtctttatggcgcaccattgaagtggctcgggtagcatggatggcgtcttgtgttccagcgccgctagcagcggaggctctccaccgccgattcgctcggcgaaaagcgcgcccatgagcgattgagtggcaaggccatgccctgaacatcccgccgtatagaagatgttctgcctggcccctgtcaccccgaccacggggaggaagtcgtaggccccgctgatatacccgctccagcaatgccgaatggcaaggccctgcaaggaaggaaaacgctcgcgcaacactctcgacaacgcggcgtaggcggcgtggtccggaacattgggtgtcttcgagccgtaggcataacccaattgcttcacggtcagcagcagggtgtcatgggccgtcaggcgatgactttccatggtgtagtgcggcgtaatgaggccttcacgctcttgccaacccagggacgccagttgctccgccgatagtggctgggtttcgattgccgaaacccggatcggtgcaaccttgttgcgtagcactcccagctgaggcgtgtaggcgttggtcgccagaaccattacaggggcggtggcgataccctgggccgtattgcaggtaatcacctgcccttcacagtaggaaagcaccggcgtgcgttcgtacaatttcacgccagccttgattgccgcacgacgcaggccgttgacgtactttcccggattcaaggtgccgccacgctgctcgctgccaaacaggaatgcgggcggtatgcctcgcgcgcgcatctcggcgctatccacgaagcgcgtgacagagcccagcgcgtggccaagctccatgttcgctcgcagtcgcttttcctggctgggatggacggcggcccggatgattcccgagggcgtgtaatcgcaatcgatgtccagcgcagccaaacgctcttccacataggtgacggcctcgtcatagaaaccgacgaacttacgtgcctgctcaagccccactcgcttgacgaaaacctcgcattctatgcccatactgccgagcagatagccggcattgcgcccgctggccccgaagcctgcgaactgctgttccagaacgatgacgttcgctccacgcgcccttagttccagcgccgttgacaggccggcgaacccggcgccgaccacgactacgtctgcgtgctcgtggcctttcagcgccggctgcaggtcgtctggctgctccacccatccgccaaggctgcggaatctcatgggttctgcattgttgcgtgccgctccgttgaaggcattcattcacatcactcccgggttgccggacgttgttcctctcatgggccgatccatggcagtgccgctagaaccccttccccgcctcggaaaaggagggcatgcccaacagctcttgcgggtcacgcatctgaccatcgatctccacccaacccagtagcgtggaactggcactccatcccagcagacgctgcatttgcgaggggagctgccgaacgcgctcgacgggtatggaaaggaagtggttttcttccaggcgcaggaaggccaggtcataggccatggtcaggcctatgcgaggagcgtcggatctgttggcgccaccgccgtgatataccgatcccagccagagaagcgcagtgcctgccttcatttctgcgccgatggtttcttcctgggtgggcatccgttcgtcatcccattgatgactgccaggaatgacccgcgtcgcgccgttctcttcggtgaagtcggtaatcgccagcatgagctgcaagcgagcctcgcgaccatactgcggatgccgccagagcgaagtggcatcgtcgcgatgcaggggttgaagaccttgtccaggcccgatctgtatcgcctgggtcatgctcagttggatatcgggcgtgatctcgacccgatcgttccctacccagacatgggtgggagtctgcaatacctgctttgccgtctcgaggaacagggggttcagtgccacttccacggcggagtcgcttttcgccaggatccgcgcggtacgtcgagtctgggtgccggcgaagtaagggtccatgccgcagggggtaacgcccagatagctgtccaggtcctcggtaagagacttcaaggtttcttccgagacgaagttgcaaatagcgacagcgccatcacgcctgatgatttccactacctgctcgatcggggtgtcgcagctgactgtcgtcaatcttcgcgtactcatctgatgcctacctgtgtggtgttgtcattgttctgcagggcttccgcaatcaacctcagcccatgagcgttcactctcatgcggtcagaccgccctctccttgcgcctggcgaggaaaggaggtttgatcatacgacatgatcatgtgatcaagtcaaacgattaataattctgcgtggcatctcggcgctcaggaaaggcctgccgaatcaagatccggctctacgcgggttcgcgctggcgatagcggattgcccaggctcgatcctgttccgcttcggctacgcatcgccggcggtcggagcgaaacatctggagagacaaagggtcgctgcctcggtcctcaagcgtgtcgactcatggattgggggacggccatgcgttagcattcgtcccggtcgacagcggaccagtcgcctggcggcaacaccgaagaaggagaagctgaatggctcgagtgggcgccgaagtgcgcaggcaagactttattgaggccgccgtgaaggtgatcgcggaatatggtgtggcgaatgccactacccgtcgcatcgcggccgcggcgaattctccattggcctccctgcactatgtcttccacaccaaggacgaattgttcgacgcggtctatgaatccctgatagacaagccacagcagtccttgctgcatgttacggcgggagccacggcggcagactcggtagcagagatattgcgccagttggtcgggtggttcaccacgcatccggaactggcgactacgcagttcgagctgtttttctggaatctgcgtaacaaccccgctatggcgagcaagatctacaccgattccgtcgaagcgacgaagcaggccattgaacaggtcgctggctcggtgctggaccaggaagcgctggccactgtcagtcgcttgctcatcaacctgttcgatggcttgcttctcgcctggtccgcccatggtgaccaggagcggctgaatgccgagaccgaagccgcctgccaggctgtgaagctgttggtggccagcttctgatcttttcgaaggcgcatctctagagaggggcatggtgacacggttcgccgtgcccctgctcttcgggcctcttgccagttcaggtgcagcgcctcttctagttctcctctccccgcctccgcttccagcggaatcctgggcggctatctcgccggtccttccccctcatagtcctgcaagttgactgtgcgcttctcgtccatgcaacaggccttccgccatggcctggcgggaactggctgcggcacctaggtgcaaataaacccaaaccgatggaaacctggtgcatttcgcaccttgtaccagcaactcgctcgcgtctattctggtcaaacgatcaagtcaaaagatcaagtcaaaagatcaagtctctataacacaacaataggaggcgacatgtcctctcacactgctcttccaattgagccgctcgatgttctgatcataggagccggtgtgtctggcatcggcgctgcggcttaccttcgacgtcaccaaccgaacaaggtgtttgcgattctcgagtcccgggagcgaatgggcggcacctgggacctgttccgctatcccggcatacgctccgactcggacctgtacaccttcggcttcgacttcaagccttggaccaaggcgaaatctctggcggatgccgccgacattctcgaatacctgcgagaagccgtcgctgaataccagttggaccccttcatccagtaccggcagaaagtggtctcggcgaattggcagagcgacaaagggctgtgggcggtatgcgtcgaggacggccacacggcagaaacccgcaccatcgaatgccgctggctgttcagcgcaggcggctactaccgttatgaccaaggcttcagcccacgcttcgagggcgcggagcagttcaaggggcaaatcatccacccgcaacactggcccgagcgcttggactatcggggcaagcatgtggtggtcatcggcagcggcgcaacggcggtgaccctgattcccgccatggccgacgaggtcgccagcatcaccatgttgcagcggacgccctcctatatcgtcaaccagcccgccaacgattccgttgccgcttttcttcgcaagattctgccggcgcaaaccgcctactcactgacgcgctacaagaatgccaagatcaccctggtcttctggcgattctgccagcgcttccccgggctcgcccgcaagctgctcatatggctgacccgtagagaattaccgaagggctatccggtcgacgttcatttcaacccgccctacaagccctgggaccaacgcttgtgctcggttcccgaaggcgatcttttcaaggccatcagtgcaggtaaagcctcggtcgttaccgaccatatcgagcgctttaccgagtccggtgtcttgctcaagtccggcacggaactgaaggccgatatcatcatcacggccaccggtctgaacgtgcagttgttcggcggtatcgccctgcacaaggatggcgagccggtagtgttgagccagacgctggcgtacaagggcacgatgctttccggcgtacccaattttgcctttgcggtgggctataccaactcatcctggacgctgaaagtatgcctgctgtgcgaccacttctgtcgcttgctgggcttcatggacagccagggccataacgtctgcgagccgaaggcgccggatggtgtcgaaacccgtcccctgctggatttcggggccggatatgtccagcgggcattggatagcatgccgcgccaggggcctcgcgagccctgggtgatgtcgatggattacttccgtgacatcaagcttttgcgccgagggaaggtcgccgacgaatgcctccggttcagcacggtgcctgacgcctacctgcacagaagcgtggcgcttcagactcagggcggcgggcgatgactgcggatcggttctgcgagctaccgggcaagcgtagcctctgctatcgcagccacggtccggaaaccgcgcctgcggtcatcctcatcgtcggcctggggctgcaattgatctactggcctgaagcgctcatcgccggcctggtcgagcggggcctgcgcgtgatcacgctggacaaccgtgactcgggcaggtctttcttcaccgaggtcaccccgcccacgaccctgcaacagttcttccgcaaaccgactgcggggtatgacctgggcgacatggccgacgatgtgatcggcctcatggatggcctgcgcctgggtgcggcgcacgtcgtagggatgtcgatgggcggcatgatcgcccagacacttgccgctcgttatccgcagcgagtcatgagcctggcgtccatcttctcgacgacaggatcgcttcgagtaggcctgccagcgttcaagaccatcttgcagcttctccggcgtcctccccggaaccagcgggagagcgttcgcgactatgtggagatcatgcgttccgtcggtacgacgctggaatgggacgagcaggcccatcgcgactacgccatgcaagcctgggagcgaggcggcggggaagcgagcaacctcgggatggcgaggcagatcggcgccatcatcaactcgggcgaccgaacgcaggaactccagcgaattcgctgcaacacgctggtcatccatgctgagaaagacctcatggtcgccaccagcggaggcttcgccacggcggcggccattcccagggcgcgcttggtgctgttgccgggaatggggcatgacttccccgcctgcctgacaggaacgctgctttccctgctcgcaggccaaatgcattagtacggagcatcccttcaggggcgggtgggtgccgcccctctttttacacctcgggacttgcatggggcttttcgaagttcgtgcttatccaggcccacataagacaaaaaggttcccggttgattctcgaccgcagagccatgcatcacacgccggagccgttggttcgccctgcgcgtgaattcctccactgccgttcaacaacgacaaaaatcgagcaagaggtacgtatggaattcaagttcttactccccgccaaagtcgtgatgggacccgacctgcgtgagcgcaccggcgaatacctgcgggaactcggcatggcgcatgtgctgatcgtgacggacgccggggtaaaggccgcaggcctgttgaatggcgtgtatgccagcctgaatgagtgggagatcgcgttcgacgagatatcggacgtcaaggcaaaccctcgcagcgaagacatcaaccaggcggcgcagctgtatcgcggcaaaggtatccaaggcctgctggccatcggcggcggcagcgcgatggacgcggccaaggcgatcagcctgctgctgacccacgagggccggatcgaagactacgagggctctttcaccctcaggcacgccatcccgcctatcgtcgccatcccgaccaccgccggaaccggcagcgaagtgacctgtttctcggtgatcaccgataccgcccggcatttcaaaatgagcgtccaggattaccgggtgggccccgttctggcattgctcgactcccgcattctcgacacgctgcctgcatcgattgccgccgcaaccggcatggatgccctcacccacgccatcgaagcctacacctgccgtgtgtcgaatccgatcagcgacgggctggcgctgcatgccatccgcctgatcagccaatacctcaggcccgccgtactggagccgggcaacctgcatgcacgcgagcaaatgctggtggccagcctgatcgccggcatggccttcggtaacgcggacgtcggcagcgtgcactgcatttccgaagccatcggtggcatgtacgacacgccacacggcgtgggcaacgcgatcttcctgcccttcgtgttcggccataaccgcgacgccgacatcacccgccacgcgcaggtcgcctacgcattgggtatcgaccccaacctctcgccggccgaggccgccgaggccgccgttggctacctgttccagatgagcaaggacctgggcatcccccgcttcgccgaggtgaaaggcgtgcgcgaggaagacttcctgagcatcgccgaaaagtcgaagaagaatttctccgacggcagcaatgccaagcaaatgacggtggaaacctaccgtgaaatcgtcgccgccgcttaccactacgtagcgtgaaggaggcccgtcatgagcgaatcaatcgccggcgcttcattgaagcgcacgctgggtccgttttccgttctgctgttcggtctggcgttcctcgctccgttgatcgtgttcggcacctatggcgtgatcacgcaggccagcggcaacaccactgcgatggcctacctgatcgcggcaatcggcgtggtgttcacggccttgagctatggccggctggtcagggtgttcccggtcgccggttcggcctacacctatacccgcaagatgctgagcgcgaacctcggcttcatggtgggctgggccgccctactcgattacttcttcatcccgatgctgatctggctgctcggcgccagctacctcaacatggcctttccagaggtgccgcaatgggtgtggatcatcggcttcatcgtctccacctcgctgcttaatatcctgggcatccaggtcgccaaccgcttcaacgtgctgttgatggtcgcgcaactggccatcatcgtcgtgttcatcagcctgtgcgtgcactacatcgtcgcggccaacggccctggcgggctgctgtcggccaagccgttcttcaacccggacgtgtccttcgccaccagcatggccggcgccgccattgccgcgtactcgttcctgggcttcgacgcgctgtccacgctcagcgaggagacccgcgacccgggccggacactgccgcgcgcgatcctgctggtcgcattgatcggcggttcggtctacgtcggctcgtcgtacttcatgtacctggcgcacccctcccccgccttcgagcatgtggacggcgccgccttcgagatcgcccgcatgatcggcggcgacctgttcttcgccgtggtcctggcggggatcatcatcgcccacttcgccgcaggcatgtcgttccaggccagcgtgggccggctgctgtacgccc
